(19) United States
(12) Patent Application Publication
(10) Pub. No.: US 2019/0382845 A1
(43) Pub. Date: Dec. 19, 2019

(54) PROSTATE CANCER AGGRESSIVENESS BIOMARKERS

(71) Applicant: University of Southern California, Los Angeles, CA (US)

(72) Inventors: Inderbir Singh Gill, Los Angeles, CA (US); Peter Jones, Los Angeles, CA (US); Gangning Liang, Los Angeles, CA (US); Kamilla Mundbjerg, Los Angeles, CA (US)

(21) Appl. No.: 15/999,311

(22) PCT Filed: Feb. 17, 2017
(86) PCT No.: PCT/US17/18517

§ 371 Date: Aug. 17, 2018

Related U.S. Application Data
(60) Provisional application No. 62/296,707, filed on Feb. 18, 2016.

(51) Int. Cl. C12Q 1/6886

(52) U.S. Cl. CPC C12Q 1/6886; C12Q 2600/154; C12Q 2600/112

(57) ABSTRACT

A method of identifying subjects having prostate cancer is provided. The method includes obtaining a sample from a subject, isolating DNA from the sample, determining the methylation status of the DNA, and comparing the methylation status of the DNA to one or more methylated probes selected from the following: cg00697992, cg01272707, cg01819167, cg01906055, cg02160684, cg02560085, cg03195164, cg03456213, cg04634417, cg06024295, cg11748187, cg13300630, cg13944838, cg14399930, cg15132013, cg16469740, cg17004353, cg17032646, cg18315943, cg19550524, cg20399616, cg24517686, cg25961816, cg26447413 and cg27198013. The comparison indicates whether the sample is normal, a non-aggressive prostate cancer, or an aggressive prostate cancer.

### CROSS-REFERENCE TO RELATED APPLICATIONS

[0001] This application is a 35 USC § 371 National Stage application of International Application No. PCT/US2017/018517 filed Feb. 17, 2017, now pending; which claims the benefit under 35 USC § 119(e) to U.S. Application Ser. No. 62/296,707 filed Feb. 18, 2016, now expired. The disclosure of each of the prior applications is considered part of and is incorporated by reference in the disclosure of this application.

### INCORPORATION OF SEQUENCE LISTING

[0002] The material in the accompanying sequence listing is hereby incorporated by reference into this application. The accompanying sequence listing text file, named USC1300-1_ST25.txt, was created on Jun. 6, 2019, and is 551 KB. The file can be accessed using Microsoft Word on a computer that uses Windows OS.

### BACKGROUND OF THE INVENTION

### Field of the Invention

[0003] The present invention relates to methods of screening and diagnosing prostate cancer.

### Background Information

[0004] Prostate cancer (PC) is the most frequently diagnosed cancer and the second most common cause of cancer deaths in men in the United States. Although PC incidence rates have increased over the past 25 years, mortality rates have largely remained unchanged (www.cancer.gov). The advent of a PC diagnostic test, which measures the level of prostate specific antigen (PSA), has resulted in the discovery of earlier, smaller lesions, as well as increased the need for prognostic tools to avoid overtreatment of indolent PC¹. Localized PC is curable through radical prostatectomy or radiation therapy, albeit often followed by significant side effects, including urinary incontinence (5-20%), erectile dysfunction (30-70%), and bowel toxicity (5-10%)^{2,3}. Generally, PC is a slow-growing malignancy with decades of indolence, but takes on an aggressive form displaying rapid growth, dissemination, and lethality in a subset of cases (<20%)^{1,4}.

[0005] Predicting tumor progression is critical for clinical decision-making. PC is graded using the Gleason system, in which tumors with higher Gleason Scores (GSs) tend to be more aggressive^{5,6}. However, the relationship between individual GS of clinically-localized PCs and those that progress to metastatic disease is poorly understood⁷. The tumorigenic events during PC progression have been difficult to investigate, and the ability to characterize late stages of PC progression is lacking due to very limited availability of metastatic tissues. In addition, 60-90% of PCs are multifocal⁸, in which one prostate contains several seemingly unconnected locations of cancer growth. The development of multifocal PC is still highly debated and two models have been described⁸. Either one initially-transformed cancer has spread to multiple locations within the prostate (monoclonal), and/or the cancer arises independently several times in the same gland (multiple subclones)⁹⁻¹⁸. The latter option indicates the possibility that aggressive and non-aggressive cancer foci co-exist in the same prostate gland, and is supported by the finding that individual foci of multifocal PC often present with unique GSs¹⁹. Consequently, the index lesion (the cancer lesion with the largest volume or the highest GS depending on the study) may not be representative of the PC pathology²⁰, and subsequently complicates sample selection for analysis. Therefore, previous studies that have not accounted for prostate tumor multifocality, or used only the index lesion, are potentially flawed.

[0006] Currently, no curative therapies are available for metastatic PC. Thus, a central dilemma in management of clinically localized PC is whether to postpone treatment until the disease becomes more aggressive in order to minimize patient health side effects, or to treat immediately to avoid dissemination. Identifying the primary lesion that drives cancer progression is critically advantageous in order to guide treatment decisions at the time of diagnosis. In this scenario, ideally, only patients with potential aggressive PC lesion(s) should undergo surgery, while patients with exclusively clinically insignificant (non-aggressive) cancer should be monitored using active surveillance.

[0007] DNA methylation alterations occur in every cancer type, and importantly, DNA methylation levels change concordantly with tumor aggressiveness in most types of cancer²¹. Epigenetic alterations can drive tumorigenesis and determine tumor aggressiveness, and therefore, can be used for PC diagnostic purposes²², as well as to inform on therapeutic approaches^{23,53}. Although PC has been shown to harbor a great hereditary element^{24,25}, only an estimated ˜30% of these factors have presently been accounted for²⁶. Interestingly, recent studies have been able to tie a connection between genetic alterations and DNA methylation changes, which indicate that DNA methylation changes hold information about clonal evolution of PC. For example, multiple metastases within a PC patient have been shown to arise from a single precursor cancer cell, or focus, by copy number alterations (CNA) as well as by DNA methylation changes^{27,28,54}, suggesting that only one focus of a multifocal PC is responsible for the development of the metastatic lesions. Moreover, unified evolution of DNA methylation and CNAs was identified in five cases of multifocal PC with monoclonal origin and their matched lymph node metastases¹¹.

### SUMMARY OF THE INVENTION

[0008] One aspect of the present invention is directed to a method of identifying subjects having prostate cancer. The method includes obtaining a sample from a subject, isolating DNA from the sample, determining the methylation status of the DNA and comparing the methylation status of the DNA to one or more methylated probes selected from the following: cg00697992, cg01272707, cg01819167, cg01906055, cg02160684, cg02560085, cg03195164, cg03456213, cg04634417, cg06024295, cg11748187, cg13300630, cg13944838, cg14399930, cg15132013, cg16469740, cg17004353, cg17032646, cg18315943, cg19550524, cg20399616, cg24517686, cg25961816, cg26447413 and cg27198013. The methylated probe includes a sequence region that extends up to 250 base pairs upstream and downstream from the methylated probe. The comparison indicates whether the sample is normal, a non-aggressive prostate cancer, or an aggressive prostate cancer.

[0009] Examples of methylation sensitive assays that can be used to determine the DNA methylation status include but are not limited to HM450, HM850, real-time methylation sensitive PCR (MSP), MethyLight and Pyrosequencing.

[0010] In one embodiment, the sample is a biopsy sample.

[0011] In another embodiment, the biopsy is from a prostate.

[0012] In another embodiment, the biopsy is from a pelvic lymph node.

[0013] In another embodiment, two or more methylated probes are selected.

[0014] In another embodiment, the sample is selected from the following: blood, plasma and urine.

[0015] In another embodiment, the sequence region extends up to 100 base pairs upstream and downstream from the methylated probe.

[0016] In another embodiment, the sequence region extends 0 base pairs upstream and downstream from the methylated probe.

[0017] In another embodiment, five or more methylated probes are selected.

[0018] In another embodiment, fifteen or more methylated probes are selected.

[0019] Another aspect of the present invention is to provide a method of classifying prostate cancer. The method includes obtaining a sample from a subject, isolating DNA from the sample, determining the methylation status of the DNA, and comparing the methylation status of the DNA to one or more methylated probes selected from the following: cg00697992, cg01272707, cg01819167, cg01906055, cg02160684, cg02560085, cg03195164, cg03456213, cg04634417, cg06024295, cg11748187, cg13300630, cg13944838, cg14399930, cg15132013, cg16469740, cg17004353, cg17032646, cg18315943, cg19550524, cg20399616, cg24517686, cg25961816, cg26447413 and cg27198013. The methylated probe includes a sequence region that extends up to 250 base pairs upstream and downstream from the methylated probe. The comparison indicates whether the prostate cancer is non-aggressive or aggressive.

[0020] In one embodiment, the sample is a biopsy sample.

[0021] In another embodiment, the biopsy is from a prostate.

[0022] In another embodiment, the biopsy is from a pelvic lymph node.

[0023] In another embodiment, two or more methylated probes are selected.

[0024] In another embodiment, the sample is selected from the following: blood, plasma and urine.

[0025] In another embodiment, the sequence region extends up to 100 base pairs upstream and downstream from the methylated probe.

[0026] In another embodiment, the sequence region extends 0 base pairs upstream and downstream from the methylated probe.

[0027] In another embodiment, five or more methylated probes are selected.

[0028] In another embodiment, fifteen or more methylated probes are selected.

[0029] Another aspect of the present invention is directed to a method of identifying subjects having prostate cancer. The method includes obtaining a sample from a subject, isolating DNA from the sample, determining the methylation status of the DNA and comparing the methylation status of the DNA to one or more methylated probes selected from the following: cg20399616, cg12737160, cg23624008, cg09789590, cg23095615, cg14273822, cg04294888, cg12098872, cg21981270, cg21526205, cg09806262, cg01940855, cg23855505, cg18423852, cg22260952, cg21883802, cg00036011, cg26573704, cg12727795 and cg01404317. The methylated probe includes a sequence region that extends up to 250 base pairs upstream and downstream from the methylated probe. The comparison indicates whether the sample is normal or prostate cancer.

[0030] In one embodiment, the sample is a biopsy sample.

[0031] In another embodiment, the biopsy is from a prostate.

[0032] In another embodiment, the biopsy is from a pelvic lymph node.

[0033] In another embodiment, two or more methylated probes are selected.

[0034] In another embodiment, the sample is selected from the following: blood, plasma and urine.

[0035] In another embodiment, the sequence region extends up to 100 base pairs upstream and downstream from the methylated probe.

[0036] In another embodiment, the sequence region extends 0 base pairs upstream and downstream from the methylated probe.

[0037] In another embodiment, five or more methylated probes are selected.

[0038] In another embodiment, fifteen or more methylated probes are selected.

[0039] Another aspect of the present invention is to provide a method of classifying prostate cancer. The method includes obtaining a sample from a subject, isolating DNA from the sample, determining the methylation status of the DNA, and comparing the methylation status of the DNA to one or more methylated probes selected from the following: cg25729795, cg09771468, cg01386424, cg21397588, cg18595258, cg01957088, cg12950441, cg05733231, cg19155518, cg13060157, cg16201038, cg01906055, cg16473141, cg17380661, cg04145287, cg22462983, cg01419991, cg06969287, cg04634417 and cg16692973. The methylated probe includes a sequence region that extends up to 250 base pairs upstream and downstream from the methylated probe. The comparison indicates whether the prostate cancer is non-aggressive or aggressive.

[0040] In one embodiment, the sample is a biopsy sample.

[0041] In another embodiment, the biopsy is from a prostate.

[0042] In another embodiment, the biopsy is from a pelvic lymph node.

[0043] In another embodiment, two or more methylated probes are selected.

[0044] In another embodiment, the sample is selected from the following: blood, plasma and urine.

[0045] In another embodiment, the sequence region extends up to 100 base pairs upstream and downstream from the methylated probe.

[0046] In another embodiment, the sequence region extends 0 base pairs upstream and downstream from the methylated probe.

[0047] In another embodiment, five or more methylated probes are selected.

[0048] In another embodiment, fifteen or more methylated probes are selected.

[0049] In other aspects of the present invention, the methylated probes that are used in identifying subjects having prostate cancer and/or classifying prostate cancer can be one or more methylated probes selected from those methylated probes listed in Table 4. The sequences of all the probes listed in Table 4 are also available from Illumina.

[0050] Prostate Cancer (PC) is a slow-growing malignancy, but acquires aggressive traits in a subset of cases. PCs have a propensity to be multifocal. Here, we show that DNA methylation of PC metastases is highly similar to specific primary foci, build an aggressiveness classifier, and determined PC aggressiveness of foci based on DNA methylation profiles in matched primary tumors and metastases. The classifier is significant associated with aggressiveness and the presence of lymph node metastases (P=9.2×10⁻⁵) and invasive tumor stages (P=7.7×10⁻⁷) in an independent cohort. Overall, this invention provides molecular-based support for determining PC aggressiveness with importance for clinical decision-making.

[0051] Other aspects and advantages of the invention will be apparent from the following description and the appended claims.

### BRIEF DESCRIPTION OF THE DRAWINGS

[0052] FIGS. 1A-1B. Strategy and sample selection. (FIG. 1A) Schematic representation of a prostate gland with four cancer foci (green and orange areas) and a pelvic lymph node with metastasis marked by a purple star. We discovered that we can determine the primary focus of metastasis origin based on DNA methylation in the lymph node metastasis, and this in turn will represent the most aggressive cancer subclone. By determining the aggressive subclone in multifocal PCs, we will obtain groups of aggressive and non-aggressive samples, which will form the basis for developing a classifier to determine the aggressiveness of primary PC foci. (FIG. 1B) An overview of the samples from patient 41 is shown in the upper left corner. P=patient, T=primary tumor focus, NL=tumor-negative lymph node, and PL=tumor-positive lymph node. The physical location of the five prostate samples and the two lymph node samples collected are shown on schematics of the dissected prostate gland (middle) and the lymphatic system (lower left corner), respectively.

[0053] FIGS. 2A-2B. DNA methylation patterns of lymph node metastasis indicate the potential primary focus/foci of origin. Left: Unsupervised clustering and heatmaps of all the samples from patient 41 (FIG. 2A) and patient 54 (FIG. 2B) based on the top 1% most variably methylated probes between all samples except the PLs. Dendrograms are shown above the heatmaps and the color key to the right. Right: Copy number alterations in Patient 41 (FIG. 2A) and Patient 54 (FIG. 2B). In each plot the samples were ordered based on the unsupervised clustering from the heatmaps to the left. The numbers and letters on the left of the plot designate the chromosome numbers. To the right is shown the color key; red=chromosomal gain and blue=chromosomal loss.

[0054] FIGS. 3A-3B. Building an aggressiveness classifier. (FIG. 3A) Phylogenetic reconstruction showing clonal relationships in each patient based on all filtered HM450 probes. Averaged normal prostate and normal lymph node samples were used for each tree. Sample types are colored with black (normal and PIN), orange (aggressive primary tumor), green (non-aggressive primary tumor), yellow shaded (undecided primary tumor), and purple (lymph node metastasis). Below each tree the longest Euclidean distance between any two samples in the tree are denoted so as to serve as a reference between the different trees. (FIG. 3B) MDS plot based on 25-probe classifier generated by GLMnet of the samples used for the analysis. The samples are separated into 3 distinct groups without overlap.

[0055] FIGS. 4A-4C. Validation of the PC aggressiveness classifier. (FIG. 4A) Manhattan plot of the probabilities calculated for 100 randomly selected samples from the TCGA PC cohort. Color bar in the bottom of the plot designates the sample types determined by TCGA. Black=Adjacent normal prostate. Yellow=Primary PC. Purple=PC Metastasis. The black dotted line marks the probability threshold used. (FIG. 4B) Distribution of the prediction of TCGA normal and tumor samples. (FIG. 4C) Evaluation of correctly predicted samples based on the histological microscopic examinations performed by TCGA.

[0056] FIGS. 5A-5E. Clinical information for predicted TCGA groups. (FIG. 5A) Pre-operative PSA among the aggressive (n=215) and non-aggressive (n=64) groups. Welch two sample t-test=0.005. Tumor size represented by the average intermediate dimension in cm among the aggressive (n=87) and non-aggressive (n=25) groups. Welch two sample t-test=0.9428. Percentage of patients with lymph node metastases at the time of surgery among the aggressive (n=187) and non-aggressive (n=52) groups. Fisher's exact 2-tailed P(Yes)=9.2×10−5. Pathological T stage distribution among the aggressive (n=217) and non-aggressive (n=64) groups. Fisher's exact 2-tailed P: P(T2)=2.2×10⁻⁷, P(T3)=7.7×10⁻⁷, P(T4)=0.6969. GS distribution among the aggressive (n=217) and non-aggressive (n=64) groups. Fisher's exact 2-tailed P: P(GS 6)=0.0591, P(GS 7)=0.2539, P(GS 8-10)=0.0220. P-values<0.05 are marked by an asterisk. (FIG. 5B) Distribution of Gleason 3+4 and 4+3 tumors among the aggressive (n=96) and non-aggressive (n=34) groups. Fisher's exact 2-tailed P(3+4)=0.8424. P-values<0.05 are marked by an asterisk. Pathological T stage of Gleason 7 tumors among the aggressive (n=96) and non-aggressive (n=34) groups. Fisher's exact 2-tailed P: P(T2)=1.5×10−4, P(T3)=1.2×10−4, P(T4)=1. In FIG. 5C, FIG. 5D and FIG. 5E, Fisher's exact 2-tailed tests were used to calculate significance. P-values<0.05 were considered significant.

[0057] FIGS. 6A-6B. (FIG. 6A) Boxplot of 500 probes methylated in prostate tissue and unmethylated in peripheral blood. The normal lymph node samples had median DNA methylation beta values of ˜0.2. Any of the other samples with medians below 0.6 were excluded from further analysis: P15_PL and P32_PL.Tumor purity. (FIG. 6B) Boxplot of GSTP1 promoter DNA methylation for all samples. Tumor samples with median DNA methylation below 0.4 (dotted vertical line) were excluded from analysis: P17_T3 and P23_T3. The two PIN lesions were both just below 0.4 and were kept for further analysis.

[0058] FIG. 7. Sample dissimilarity. MDS plot drawn from Euclidean distances calculated based on all filtered probes.

[0059] FIG. 8. Unsupervised clustering and heatmaps. Clustering and heatmap visualization for all samples from Patients 14, 17, 23, 24, 26, 43, 52, 56, 84, 85, 88, and 98 was based on the top 1% most variably methylated probes between all samples, except the PLs. Dendrograms are shown above the heatmaps and the color key to the right.

[0060] FIG. 9. Input probes for GLMnet analysis. Heatmap of the top 3,000 most differentially methylated probes between the aggressive (n=31) and non-aggressive (n=10) groups based on the average methylation differences. Sidebar on the top shows the group of each sample (same as in FIGS. 3A-3B).

[0061] FIGS. 10A-10B. Clinical characteristics of TCGA PC GS 7 tumors. (FIG. 10A) Pathological T stage of Gleason 7 tumors among the aggressive (n=96) and non-aggressive (n=34) groups. Fisher's exact 2-tailed P: P(T2)=1.5×10⁻⁴, P(T3)=1.2×10⁻⁴, P(T4)=1. (FIG. 10B) Distribution of Gleason 3+4 and 4+3 tumors among the aggressive (n=96) and non-aggressive (n=34) groups. Fisher's exact 2-tailed P(3+4)=0.8424. P-values<0.05 are marked by an asterisk.

[0062] FIGS. 11A-11C. DNA methylation of metastasis and primary site from the same patient is highly similar. (FIG. 11A) Between-sample correlation plot. Sample names are shown to the left of the plot. At the top and the left of the plot are colored sidebars showing sample type and patient identifier. The sidebar to the right of the plot shows the correlation coefficient color key; red being high correlation and blue low correlation. P=patient, AN=adjacent normal, T=primary tumor focus, NL=tumor-negative lymph node, and PL=tumor-positive lymph node. (FIG. 11B) Enlargement of correlation amongst primary tumor foci in patient 41. (FIG. 11C) Enlargement of correlation between all primary tumor foci and all positive lymph nodes.

[0063] FIG. 12. Input probes for GLMnet analysis. Heatmap of the top 3,000 most differentially methylated probes between the aggressive (n=31) and non-aggressive (n=10) groups based on the average methylation differences. Sidebar on the top shows the group of each sample.

### DETAILED DESCRIPTION OF THE INVENTION

[0064] A “biomarker” as used herein refers to a molecular indicator that is associated with a particular pathological or physiological state. The “biomarker” as used herein is a molecular indicator for cancer, more specifically an indicator for prostate cancer.

[0065] As used herein the term “cancer” refers to or describes the physiological condition in mammals that is typically characterized by abnormal and uncontrolled cell division or cell growth. Examples of cancer include but are not limited to, carcinoma, lymphoma, blastoma, sarcoma, and leukemia.

[0066] As used herein, a “subject” is preferably a human, non-human primate, cow, horse, pig, sheep, goat, dog, cat, or rodent. In all embodiments, human subjects are preferred. The “subject” may be at risk of developing prostate cancer, may be suspected of having prostate cancer, or may have prostate cancer. In addition, a “subject” may simply be a person who wants to be screened for prostate cancer.

### Example 1

### DNA Methylation Patterns of Lymph Node Metastases Indicate the Potential Primary Focus/Foci of Origin

[0067] In this study, aggressive primary cancer focus/foci can be identified from multifocal PC by the degree of correlation of DNA methylation to lymph node metastases, which represent an aggressive trait (FIG. 1A). The study relies on four assumptions: 1) A subset of multifocal PCs arise from independent and sporadic genetic/epigenetic changes, effectively implying that distinct cancer foci develop through different molecular mechanisms/pathways and harbor unique proliferation, migration, and aggressiveness potential; 2) DNA methylation changes hold information about clonal evolution and will not change substantially upon dissemination^{11,28,29}, 3) metastases have the same clonal origin^{27,28}, and 4) The pelvic lymph nodes drain from a cancerous prostate and are likely the first location for development of metastases. Thus, lymph node metastases are herein defined as an aggressive trait and are used as an indicator of the ability to establish distant metastases as well.

[0068] We used the Illumina HumanMethylation450 BeadArray (HM450) platform to measure the DNA methylation status of matched primary tumors and pelvic lymph node metastases in 16 patients with multifocal disease (Table 1). The prostate and lymph node tissue samples stored in FFPE tissue blocks were sectioned, H&E stained (FIG. 1B), and examined by a trained pathologist. All areas of cancer were marked and given a GS. In addition, areas of adjacent normal prostate cells and prostatic intraepithelial neoplasia (PIN) were marked when possible, summing to a total of 92 samples (Methods).

TABLE 1
Patient Information

| | | Radical | | | | | Patient |
|---|---|---|---|---|---|---|---|
| Patient | Age | Prostatectomy | Tumor | Gleason | Nodal | Malignant | Status |
| no. | (years) | (year) | Stage | Score | Stage | LNs | (2015) |
| 14 | 64 | 2013 | pT3a | 4 + 5 | pN1 | 2/16 | Alive |
| 15 | 63 | 2007 | pT3a | 3 + 4 | pN1 | 2/9 | Alive |
| 17 | 61 | 2000 | pT3b | 3 + 5 | pN1 | 2/22 | Dead |
| 23 | 68 | 2004 | pT3 | 4 + 5 | pN1 | 14/49 | Dead |
| 24 | 66 | 2013 | pT3 | 3 + 4 | pN1 | 1/9 | Alive |
| 26 | 60 | 2013 | pT3b | 4 + 5 | pN1 | 3/45 | Alive |
| 32 | 66 | 2013 | pT3b | 4 + 4 | pN2 | 8/32 | Alive |
| 41 | 68 | 1999 | pT3b | 3 + 5 | pN1 | 6/11 | Dead |
| 43 | 62 | 2004 | pT3b | 5 + 4 | pN1 | 25/51 | Unknown |
| 52 | 75 | 2013 | pT3b | 5 + 4 | pN1 | 14/42 | Alive |
| 54 | 55 | 2008 | pT4 | 5 + 5 | pN1 | 4/8 | Dead |
| 56 | 57 | 2013 | pT3b | 5 + 4 | pN1 | 11/43 | Alive |
| 84 | 58 | 2008 | pT3b | 5 + 4 | pN1 | 4/50 | Alive |
| 85 | 61 | 2013 | pT3b | 4 + 4 | pN1 | 4/29 | Alive |
| 88 | 65 | 1991 | pT3b | 4 + 5 | pN2 | 5/20 | Dead |
| 98 | 79 | 2013 | pT3b | 4 + 5 | pN1 | 8/23 | Alive |

LN = lymph node

[0069] Sample purity was tested with respect to either infiltration of normal cells or leukocytes caused by inflammation (Methods, FIG. 6A-6B). Two primary tumor foci were removed due to low tumor cell content (P17_T3 and P23_T3), and two positive lymph node (PL) metastases were removed due to high leukocyte content (P15_PL and P32_PL), thereby excluding all samples from Patients 15 and 32. HM450 DNA methylation data from the remaining 14 patients were compared in a multidimensional scaling (MDS) plot, in which samples are placed in two-dimensional space based on dissimilarity (FIG. 7). Primary tumors and lymph node metastases were highly heterogeneous with no obvious subgroups, whereas normal prostate and lymph node tissues formed a tight cluster, as expected, indicating that the experimental protocol was successful.

[0070] In order to investigate if DNA methylation patterns hold information about clonal evolution in PC, Pearson correlations amongst all the samples were calculated, plotted, and visualized using heatmaps (FIG. 11A). Firstly, primary foci from the same patient showed more variable correlation coefficients (0.89-0.99), as compared to for interpatient AN-AN samples (0.96-0.99) and interpatient AN-NL samples (0.90-0.94), indicating that multiple cancer subclones are present in some patients (FIG. 11B) and in turn may hold distinct tumorigenic potential. Secondly, lymph node metastases consistently showed the highest correlation to one or more of the primary tumor foci from the same patient (0.94-0.98, FIG. 11C). Thus, DNA methylation profiles had not diverged to such a degree that metastases and primary tumors remained comparable. Taken together, these results demonstrate that a subset of multifocal PCs show independent epigenetic changes, indicating that cancer foci develop from unique subclones. Furthermore, the DNA methylation profiles of lymph node metastases are highly correlative to a focus/foci from individual patients.

[0071] We first investigated the DNA methylation profiles of PC foci among individual patients. To identify the focus of origin of lymph node metastasis, we selected the top 1% most variably methylated probes between all samples for each patient, excluding PLs. The DNA methylation levels of these probes from all samples, including PLs, were then compared by unsupervised hierarchical clustering and heatmap visualization. Based on similar DNA methylation levels, PLs clustered with other samples, thereby providing information about the potential clonal relationship. Heatmaps after unsupervised clustering of these probes for two representative patients, Patients 41 and 54 (FIG. 2A and FIG. 2B, left panels), as well as for the remaining 12 patients with lymph node metastases (FIG. 8), showed PLs clustering with one or more of the primary tumor foci, whereas no PLs clustered with the adjacent normal prostate tissues, normal lymph nodes, or PIN lesions. In all 14 cases with lymph node metastases, the PLs clustered with one or more of the primary tumor foci, and no PLs clustered with the adjacent normal prostate tissues, normal lymph nodes, or PIN lesions (FIG. 2A, FIG. 2B and FIG. 8). In addition, PLs were found to cluster and were highly correlated in two patients (P23 and P56) with multiple PLs (0.99 and 0.98, respectively; FIG. 8), supporting the assumption (#3) that metastases have the same clonal origin.

[0072] The PL DNA methylation profile for Patient 41 was very similar to and clustered very closely with the T2 and T3 foci, while the T4 and T1 foci were more dissimilar, as shown by the dendrogram at the top of the heatmap. For this patient, the T2 and/or T3 foci are the most likely origin(s) of the metastasis. Furthermore, the physical juxtaposition of T2 and T3 in the prostate specimen (FIG. 1B) may suggest that they diverged from the same population of transformed cells during tumorigenesis. For Patient 54, which only had two primary foci, the PL DNA methylation was very similar to both the T1 and T2 foci. Hence, both patients displayed multiple primary tumor foci with very similar DNA methylation profiles, indicating a monoclonal origin of these foci. In addition, Patient 41 also displayed tumor foci with very different DNA methylation profiles, indicating the occurrence of multiple independent transformation events and therefore, multiple subclones.

[0073] In order to validate these findings, we took advantage of the recent evidence that the HM450 DNA methylation platform can also be used to determine CNAs by summing the methylated and unmethylated signal intensities of the probes^{30,31}. This analysis provided additional evidence that the T2 and T3 foci were very similar to the PL in Patient 41. All had deletions on chromosomes 2, 10, 11, and 16 and gains on chromosomes 7, 8, and 10, however, these regions were not altered in the T1 or T4 foci, which show different CNA patterns (FIG. 2A, right panel). All three samples from Patient 54 show multiple shared alterations, as well as deletion of the short arm and amplification of the long arm of chromosome 8, both common features of PC^{32,33} (FIG. 2B, right panel). Thus, the CNA analysis supports our findings of multiple subclonal origins in Patient 41 (FIG. 2A) and a monoclonal origin in Patient 54 (FIG. 2B) using DNA methylation analysis. Moreover, the CNA results also support our finding that the origin of lymph node metastasis can be determined by DNA methylation.

[0074] Similarly, all PLs clustered with one or more primary tumor foci from the remaining 12 cases using our DNA methylation-based approach (FIG. 8). Furthermore, nine patients (P23, P24, P26, P41, P43, P56, P84, P88, and P98) showed clearly distinct DNA methylation patterns among the primary foci, indicating the existence of independent tumor subclones. Taken together, these results suggest that the DNA methylation pattern of a lymph node metastasis can be used to identify the potential primary focus/foci of origin of metastasis, and that PC patients may contain subclones with aggressive and non-aggressive potential.

### Example 2

### Development of a Panel of DNA Methylation Markers as a Classifier for PC Aggressiveness

[0075] We next devised a DNA methylation-based PC aggressiveness classifier to categorize primary tumor foci as either aggressive or non-aggressive. The unsupervised hierarchical clustering approach effectively identifies the primary origin of lymph node metastases. However, in order to categorize the aggressiveness of individual foci in a quantitative, unbiased, and objective manner, we calculated Euclidean distances between any two samples within a patient using all filtered HM450 probes. Euclidean distance, like Pearson correlation, compares sample similarities, but maintains data variability, and is also superior for analysis of differential expression³⁴. We divided the scale of Euclidean distances into discrete categories (aggressive, undecided, and non-aggressive) for all primary tumor foci. Since the purpose of this categorization method is to assemble groups of genuinely aggressive and non-aggressive tumors for biomarker development, we included a gap of 10 Euclidean distance units (undecided category) to reduce the risk of misclassification. Sample categorization for each patient is shown using DNA methylation-based phylogenetic trees where samples are colored as a function of aggressiveness (FIG. 3A and overview in Table 2).

TABLE 2
PC Foci Aggressiveness by Patient

| | | No. of | No. of |
|---|---|---|---|
| Patient | Multiple | Aggressive | Non-Aggressive |
| No. | Subclones | Subclones | Subclones |
| 14 | No | 2 | 0 |
| 17 | No | 2 | 0 |
| 23 | Yes | 1 | 1 |
| 24 | Yes | 3 | 1 |
| 26 | Yes | 2 | 1 |
| 41 | Yes | 2 | 2 |
| 43 | Yes | 1 | 1 |
| 52 | ? | 1 | 0 |
| 54 | No | 2 | 0 |
| 56 | Yes | 3 | 2 |
| 84 | Yes | 3 | 1 |
| 85 | No | 3 | 0 |
| 88 | No | 3 | 0 |
| 98 | Yes | 3 | 1 |

[0076] Taken together, our developed categorization approach found that eight patients (Patients 23, 24, 26, 41, 43, 56, 84, and 98) showed independent DNA methylation profiles indicative of multiple subclones. Five patients (Patients 14, 17, 54, 85, and 88) showed similar DNA methylation patterns indicating a monoclonal origin, and one patient (Patient 52) was not categorized as either (FIG. 3A and Table 2). These findings are in agreement with the unsupervised clustering data (FIG. 2A, FIG. 2B and FIG. 8) with the exception of Patient 88, which did not show discrete subclones as indicated by the heatmap and dendrogram. In this patient, the top 1% most variably methylated probes were not representative of the potential clonal relationship.

[0077] We next searched for differentially methylated probes between the aggressive and non-aggressive groups (FDR adjusted p<0.05), but found that the DNA methylation levels of no single probe were significantly different between the two groups. Using an FDR cutoff of 0.3, 231 probes were identified. Still, we continued to search for a set or panel of probes able to distinguish these groups from a larger panel. First, we generated a list of the 3,000 most differentially methylated probes between the assembled aggressive and non-aggressive groups based on mean DNA methylation differences (FIG. 9, FIG. 12, Table 4), which was subsequently used as input for the GLMnet algorithm35 along with information about normal, aggressive, and non-aggressive sample groups. The GLMnet model generates outputs in the form of probabilities of group membership, which are functions of the DNA methylation values for a given set of probes that differentiate the groups. For each sample, the probabilities of normal, aggressive, and non-aggressive groups sum to 1, and the group with the highest probability is the predicted phenotype of a given sample. Upon numerous iterations and refinement of the input probes list (Materials and Methods), we found a set of 25 probes (Table 3) that optimally predict normal, non-aggressive, and aggressive categories (FIG. 3B). Twenty one (84%) of the 25 probes in the classifier were among the probes with FDR-adjusted p<0.3 for either aggressive versus non-aggressive, aggressive versus normal, or non-aggressive versus normal comparisons.

TABLE 3
25-Probe Aggressiveness Classifier

| | | | UCSC | UCSC | RELATION |
|---|---|---|---|---|---|
| | | | REFGENE | REFGENE | TO UCSC |
| TargetID | Specificity | Methylation | NAME | GROUP | CPG ISLAND |
| cg00697992 | Normal | Hypo | NXPH2 | Body | N_Shore |
| cg01272707 | Aggressive | Hyper | — | — | Island |
| cg01819167 | Aggressive | Hypo | — | — | — |
| cg01906055 | Aggressive | Hypo | NCAPH | TSS1500 | N_Shore |
| cg02160684 | Aggressive | Hypo | TRIB1 | Body | S_Shelf |
| cg02560085 | Non-aggressive | Hyper | PCDHA1- | TSS200, Body | N_Shore |
| | | | PCDHA8 | | |
| cg03195164 | Non-aggressive | Hyper | C3orf37 | Body | S_Shore |
| cg03456213 | Non-aggressive | Hyper | C9orf3 | Body | Island |
| cg04634417 | Aggressive | Hypo | PCDHA1- | TSS200, Body | N_Shore |
| | | | PCDHA8 | | |
| cg06024295 | Aggressive | Hyper | CPN1 | 1stExon, | — |
| | | | | 5′UTR | |
| cg11748187 | Non-aggressive | Hyper | TCF7L2 | Body | S_Shore |
| cg13300630 | Aggressive | Hyper | ROBO1 | Body | — |
| cg13944838 | Non-aggressive | Hypo | GFPT2 | Body | Island |
| cg14399930 | Aggressive | Hyper | FBXO47 | TSS200 | — |
| cg15132013 | Aggressive | Hypo | SKI | Body | S_Shelf |
| cg16469740 | Aggressive | Hyper | HDAC9 | Body | — |
| cg17004353 | Aggressive | Hypo | CARS | 5′UTR, Body | — |
| cg17032646 | Aggressive | Hyper | SLC6A17 | TSS1500 | N_Shore |
| cg18315943 | Aggressive | Hypo | — | — | Island |
| cg19550524 | Aggressive | Hypo | — | — | — |
| cg20399616 | Normal | Hypo | BCAT1 | Body | Island |
| cg24517686 | Aggressive | Hypo | — | — | S_Shore |
| cg25961816 | Non-aggressive | Hypo | — | — | — |
| cg26447413 | Non-aggressive | Hyper | GAS1 | 1stExon | Island |
| cg27198013 | Non-aggressive | Hypo | RAI1 | 3′UTR | Island |

[0078] One of ordinary skill in the art will recognize that the methylated probe can also include sequence regions that extend upstream and/or downstream from the methylated probe. For example, the probe region could also include 250 bases (or greater) upstream and/or downstream from the probe, 200 bases upstream and/or downstream from the probe, 100 bases upstream and/or downstream from the probe, etc.

### Example 3

### The TCGA PC Cohort Validates the Potential of the Aggressiveness Classifier

[0079] To test the classifier on an independent dataset, we took advantage of the publically available prostate adenocarcinoma HM450 DNA methylation data and accompanying clinical information from The Cancer Genome Atlas (TCGA) project. We tested 496 prostate samples (adjacent normal and tumor) using the classifier, and 70% of the samples (351 samples; 39 adjacent normal and 312 tumor samples) were predicted with a probability above 0.67 (FIG. 4A). Of the 39 normal TCGA samples, 38 were predicted as normal, and one as aggressive. Of the 312 tumors, 233 were predicted as aggressive, 67 were predicted as non-aggressive, and 12 were predicted as normal, resulting in a 97.4% specificity and a 96.2% sensitivity for PC as compared to adjacent normal tissue samples (FIG. 4B). Upon evaluation of the consistency between our predictions and the sample diagnoses (PC vs. AN) based on the histological microscopic examinations performed by TCGA, the classifier has a 76% negative predictive value (NPV) and a 99.7% positive predictive value (PPV; FIG. 4C).

[0080] To evaluate the prognostic performance of the classifier, we consulted available clinicopathological co-variates known to be associated with PC aggressiveness (pre-operative PSA, tumor size, pathological GS, presence of lymph node metastases, and tumor stage) for samples with probabilities above 0.67. Aggressiveness was significantly (P<0.02) associated with the investigated co-variates except tumor size (FIG. 5A-5E). Pre-operative PSA levels were higher in the aggressive group compared to the non-aggressive group (P=0.005; FIG. 5A). However, similar tumor sizes between groups (FIG. 5B) indicates that aggressiveness and tumor size are independent as has also been suggested previously¹³.

[0081] Upon further examination, tumors with high GSs (GS 8-10) were significantly associated with the aggressive group (P=0.022), but no such association was seen for tumors with low (GS 6) and intermediate (GS 7) scores (P=0.059 and P=0.254, respectively; FIG. 5A). GSs are well correlated with PC aggressiveness, especially at the low (GS 6) and high (GS 8-10) ends of the scale^{5,6}, and Gleason scoring is a valuable tool in PC treatment. However, additional information is required to determine aggressiveness for the intermediate (GS 7) tumors. Interestingly, the GS 7 tumors, which comprise nearly one-half of all TCGA PC tumors, were not significantly associated with non-aggressive or aggressive groups (FIG. 5A), indicating that this large group in particular may benefit from our DNA methylation-based classifier in order to determine whether active surveillance or ablative treatment is the best course of action. In support of this, we also found that the GS 7 tumors classified as non-aggressive were significantly associated with tumor stage T2 (P=1.5×10−4), while GS 7 tumors classified as aggressive were significantly associated with tumor stage T3 (P=1.2×10−4; FIG. 5B, FIG. 10A). Furthermore, we tested whether the primary and secondary patterns of the GS 7 tumors showed a correlation to the aggressive or non-aggressive groups (FIG. 5B, FIG. 10B). GS is calculated by summing the primary (largest pattern) and secondary (second largest pattern) Gleason grades, each of which ranges from 1 (well differentiated) to 5 (poorly differentiated)⁵. Interestingly, there was no difference in the distribution between 3+4 and 4+3 tumors and indicates that tumors of this large intermediate Gleason 7 group can be further and more accurately stratified using our molecular-based classifier to help determine whether active surveillance or ablative treatment should be performed.

[0082] Importantly, we found that significantly more patients classified as having an aggressive PC presented with lymph node metastases at the time of surgery as compared to patients with predicted non-aggressive tumors (P=9.2×10⁻⁵; FIG. 5D). Also, the pathological evaluation of tumor stage (FIG. 5E) showed significantly more organ-confined stage T2 tumors in the non-aggressive group (P=2.2×10⁻⁷) and significantly more of the capsule-penetrating and seminal vesicle invasive stage T3 tumors in the aggressive group (P=7.7×10⁻⁷). This strong correlation holds great promise for our classifier if developed into a molecular DNA methylation-based assay for needle biopsy samples, since the pathological tumor stage cannot be obtained until after surgery. Thus, if classification data had been obtained from needle biopsy samples prior to surgery, our recommendation would place ˜25% (67+12/312) of patients, the majority with GSs 6 and 7, in an active surveillance regimen rather than proceed with prostate ablation.

### Example 4

### Methods

### Patient Material, Samples, and Marking

[0083] Sixteen (16) patients diagnosed with multifocal PC having metastasized to one or more pelvic lymph nodes were enrolled in the study (Table 1). All patients had radical prostatectomies and removal of pelvic lymph nodes in the period between 1991-2013. No antiandrogen treatments were administered prior to surgery. The prostate and lymph node tissue samples were stored in FFPE tissue blocks. FFPE blocks were sectioned and H&E stained (FIG. 1B). A trained pathologist examined all slides covering the entire prostate and dissected lymph nodes, and all areas of cancer were marked and given a GS. In addition, areas of normal and PIN were marked when possible, adding up to a total of 92 samples. The marked H&E slides were used to guide the dissection of AN/PIN/PC cells from 8-10 unstained slides (5-10 μm).

### Deparafinization and Purification

[0084] The dissected tissue samples were deparaffinized using a double xylene wash followed by a double ethanol wash and drying of the pellets. For DNA extraction, the pellets were resuspended in 240 μl of PKD buffer and Proteinase K (Qiagen, miRNeasy FFPE kit (cat no. 217504)), and then incubated at 55° C. overnight and 85° C. for 15 min. After cooling the samples, 500 μl RBC buffer was added and the samples were run through gDNA Eliminator columns (RNeasy plus mini kit (cat no. 74134)) using RPE buffer to wash and EB buffer for elution.

### DNA Methylation Profiling

[0085] Genomic DNA (200-500 ng) from each FFPE sample was treated with sodium bisulfite and recovered using the Zymo EZ DNA methylation kit (Zymo Research, Irvine, Calif.) according to the manufacturer's specifications and eluted in 10 μl volume. An aliquot (1 μl) was removed for MethyLight-based quality control testing of bisulfite conversion completeness and the amount of bisulfite converted DNA available for the Infinium Methylation assay⁴². All samples that pass the QC tests were then repaired using the Illumina Restoration solution as described by the manufacturer. Each sample was then processed in the Infinium DNA methylation assay data production pipeline⁴³.

[0086] After the chemistry steps, BeadArrays were scanned and the raw signal intensities were extracted from the *.IDAT files using the R package methylumi. The intensities were corrected for background fluorescence and red-green dye-bias⁴⁴. The beta values were calculated as (M/(M+U)), in which M and U refer to the (pre-processed) mean methylated and unmethylated probe signal intensities, respectively. Measurements in which the fluorescent intensity was not statistically significantly above background signal (detection P-value>0.05) were removed from the data set. In addition, probes that overlap with known SNPs as well as repetitive elements were masked prior to data analyses. Specifically, all HM450 probes that overlapped with common SNPs with a minor allele frequency of greater than 1% (UCSC criteria) at the targeted CpG site, as well as probes with SNPs (MAF>1%) within 10 bp of the targeted CpG site were masked. HM450 probes that were within 15 bases of the CpG lying entirely within a repeat region were also masked prior to data analyses. The end result was a dataset of corrected beta-values for 396,020 probes which cover ˜21,000 genes.

### Calculation of Tumor Purity

[0087] To investigate the degree of leukocyte infiltration in each sample, public HM450 data from 96 male peripheral blood samples (GSE53740 and GSE51388) were downloaded using Marmal-aid⁴⁵. All HM450 probes with beta values>0.2 in male peripheral blood were excluded. The remaining probes were used to subset 500 probes that were hypermethylated in 43 normal prostate samples from TCGA, and thus hypomethylated in blood. Tissues of prostate origin from our study with mean DNA methylation of these probes below 0.6 were excluded from further analysis. Two lymph node metastases were excluded due to high blood content. Four GSTP1 HM450 probes (cg06928838, cg09038676, cg22224704, cg26250609) were used for tumor purity analysis as described in Brocks et al.¹¹. Primary tumors with mean DNA methylation below 0.4 were excluded from further analysis. Two tumor samples were excluded due to high normal content.

### Unsupervised Hierarchical Clustering

[0088] For each patient, probes with missing beta values (detection P-value>0.05) were excluded and the top 1% most variably methylated probes between all the samples except the PL(s) were selected. Heatmaps were used to display the DNA methylation levels and the unsupervised hierarchical clustering was performed with the hclust function in R (method=“complete”).

### Copy-Number Alteration Analysis

[0089] The CNAs were analyzed using the Champ package for R⁴⁶ using 28 adjacent normal prostate samples purified from FFPE tissues (12 from this study and 16 from own unpublished data) as a reference. Imported beta values were run through champ.norm and champ. CNA (filterXY=FALSE, batchCorrect=T, freqThreshold=0.3). The generated segment mean-files were intersected with the Infinium probe locations using BedTools and the resulting chromosomal loss and gain was illustrated in heatmaps using Matlab. Most of the samples showed noisy profiles, likely due to DNA breakage accumulated during the storage in FFPE, and the analysis could not be completed for all samples.

### PC Tumor Aggressiveness Categorization

[0090] Euclidean distances were calculated between any two samples using all 396,020 filtered probes. Averaged normal prostate and normal lymph node samples showed minimal variance and were used for the analysis. Normal prostate were considered to be very similar because only 0.65% (2561/396020) of standard deviations of all the probes were above 0.15. Normal lymph nodes were considered to be very similar because only 0.98% (3875/396020) of standard deviations of all the probes were above 0.15. The primary focus with the shortest Euclidean distance to the lymph node metastasis (T-PL dist 1) was categorized as aggressive. The additional distance to the other primary foci (T-PL dist 2; actual T-PL dist−T-PL dist 1=T-PL dist 2) were assessed in a density graph and a division of the scale based hereon. If T-PL dist 2s were only 0-10 units longer, they were also categorized as aggressive. This ensured that the foci of monoclonal origin would all be grouped as aggressive. Next, T-PL dist 2s longer by >20 units were categorized as non-aggressive origins and T-PL dist 2s of between 10-20 were categorized as undecided (overview in Table 2). In the two patients with 2 PLs the division of the primary tumors was done based on the PL with the shortest distance to a primary focus, which was P23_PL2 and P56_PL1.

### Phylogenetic Reconstruction

[0091] Methylation-based phylogenetic trees were inferred by the minimal evolution method⁴⁷. Euclidean distances were calculated using all 396,020 filtered probes.

### Calculation of Differential Methylation

[0092] Differential methylation between any two groups of samples were calculated using the champ.MVP( ) function from the ChAMP package utilizing either FDR<0.05 or FDR<0.3.

### Developing the DNA Methylation-Based PC Aggressiveness Classifier

[0093] By combining the categorized samples into groups of aggressive (n=31) and non-aggressive (n=10), we generated a list of 3,000 most variably methylated CpG sites (probes) between the groups. This list was used as input for the GLMnet algorithm³⁵, along with normal (n=12), non-aggressive (n=10), and aggressive (n=31) prostate sample groups. The GLMnet algorithm outputs a set of probes able to differentiate groups of samples based on their DNA methylation. Following 15 iterations, each output was evaluated by 1) the separation of the three groups (input as normal, aggressive, non-aggressive) in MDS plots like in FIG. 3B and FIG. 9; 2) the DNA methylation levels of the probes in heatmaps; 3) the prediction probabilities in Manhattan plots like in FIG. 4A for each set of probes run back on the input samples. This resulted in a refinement of the list of input probes from 3,000 to 39. Rerunning the GLMnet algorithm utilizing the 39 probes as input, a set of 25 probes (Table 3) was found to be the optimal predictor of our sample set according to normal, non-aggressive, and aggressive categories.

### Testing the Aggressiveness Classifier on TCGA DNA Methylation Data

[0094] The HM450 methylation data for the prostate adenocarcinoma samples from TCGA project was downloaded from the TCGA Data Portal (https://tcga-data.nci.nih.gov/tcga/). After filtering samples based on the same criteria as for our own samples, 499 samples (45 normal, 453 tumor, and 1 metastatic) remained. After removing samples with missing values among the 25 predictor probes, 496 samples remained (45 normal, 450 tumor, and 1 metastatic). The classifier was run on these samples and 70% were predicted with a probability above a cutoff of 0.67. A cutoff of 0.67 was chosen because as a consequence the probability for either of the two other groups must be 0.33 or less. Clinicopathological data was available for most samples in Biotab-files and are shown for the samples predicted above the 0.67 cutoff.

### Statistics

[0095] In FIG. 5A and FIG. 5B, Welch two sample t-tests were used to calculate statistical significance. In FIG. 5C, FIG. 5D and FIG. 5E, Fisher's exact 2-tailed tests were used to calculate significance. P-values<0.05 were considered significant.

### Data Access

[0096] Methylation array data have been submitted to the NCBI Gene Expression Obnibus (GEO; www.ncbi.nlm.nih.gov/geo/) under accession number GSE73549.

[0097] Identification of PC aggressiveness is fundamental to improving clinical decision-making in patients diagnosed with organ-confined PC regarding treatment or active surveillance. By implementing our design of examining DNA methylation in primary multifocal PC and matched lymph node metastases, we were able to examine the relationships amongst primary foci as well as the relationships between primary foci and metastases. Importantly, we found that more than half of the patients in our cohort showed multiple subclones, findings similar to previously reported studies^{9,11-14,16-18}, and also that DNA methylation of a lymph node metastasis is similar to a cancerous focus/foci from the same patient. Taking advantage of these findings, we developed a method to categorize the subclonal relationship and aggressiveness of individual PC foci. The resulting aggressive and non-aggressive sample groups, along with adjacent-normal samples, were used to search for biomarkers to distinguish the three groups, and the outcome was a 25-probe aggressiveness classifier. The classifier showed prognostic value when it was applied to samples from the PC cohort from TCGA.

[0098] For this study, we relied on the assumption that DNA methylation can inform on clonal evolution. Several studies have addressed the connection between DNA methylation and clonal evolution with high precision^{11,27,28} and recently, Costello and colleagues reported that phyloepigenetic relationships robustly recapitulate phylogenetic patterns in gliomas and their recurrences²⁹. Two or more foci originated from the same subclone in 11 of 14 patients in our cohort (FIG. 3A), indicating that an initial subclone seeded multiple locations through migration. We cannot definitively rule out that these are not actually one large or branched focus, since a fine physical connection can be hard to clearly distinguish in a pathological sample. Therefore, we do not attempt to determine which focus from the same subclone gave rise to the PL.

[0099] While clinical tools and techniques have improved immensely^{2,4,36-39}, the determination of tumor aggressiveness prior to physical manifestation must rely on biomarkers measured biochemically or at a molecular level. One impediment to success is how to define tumor aggressiveness with respect to a clinical end point. Often GS or time to PSA recurrence is used as a surrogate for PC aggressiveness, which would be more appropriately evaluated using metastatic progression or mortality. In this study, we used a novel approach in defining aggressiveness as the ability to give rise to lymph node metastases. The presence of lymph node metastases is an indication of tumor cells having acquired the ability to leave the primary site and proliferate in a secondary site, and thus acts as an indicator for the capacity of the cancer to establish distant metastases. In addition to this type of lymphatic dissemination, metastases can also arise through hematogenous dissemination to brain, lungs, liver, and bone marrow⁴⁸. Secondary cancer growths at these sites are not routinely removed during treatment for metastatic PC, and thus, the tissue for research is not available until postmortem. Although we recognize that distant metastases do not exclusively arise through lymphatic dissemination, we show that this clinical end point is very relevant alone or in concert with other clinicopathological parameters (FIG. 4A-4C, FIG. 5A-5E).

[0100] Gleason score 7 (GS 7) tumors are among the most difficult and poorly established backgrounds for making clinical decisions^{49,50}, however, our study demonstrated that aggressiveness of PCs with GS 7 using our classifier is highly correlated with pathological tumor stage, but not specific for primary or secondary Gleason patterns (4+3 or 3+4, FIG. 5B). Because of this, our classifier may challenge the current standard for clinical care, and may result in placing select PC patients into active surveillance and avoid invasive treatments.

[0101] A limitation to the presented study is that our discovery set is effectively only 14 patients, from whom we have 79 total samples. A larger discovery set would improve the study and would probably result in an enlargement of the classifier to more than 25 probes due to the vast PC heterogeneity⁵¹. Despite the modest size of the discovery set, we were able to validate the aggressiveness classifier, and thus, our study approach using publicly available TCGA prostate adenocarcinoma DNA methylation data from 496 primary tissues. Upon correlating our predictions with the TCGA clinicopathological information, we found a significant association (P<0.02) between aggressiveness and pre-operative PSA levels, pathological GS, presence of lymph node metastases and tumor stage, but interestingly, we did not find any correlation with tumor size. We do recognize that different clinical endpoints would be better suited to describe poor clinical outcome, however, but regret that the average follow-up period of the TCGA PRAD cohort was only 3.16 years. As a result, we found that too few patients had recurred and thus only found a significant difference between the groups for tumor status. Taken together, the presented data indicate the importance of using DNA methylation data to identify aggressive lesions more specifically than any currently used approach. This approach has clinical applications for early detection in PC biopsy specimens.

[0102] Upon suspicion of PC, prostate biopsies are performed as the standard-of-care method for PC diagnosis⁴⁰. Currently, prostate needle biopsies are most commonly performed trans-rectally in a systematic, yet random format. This systematic, random biopsy strategy has a high rate of misdiagnoses, since the non-targeted needles may either miss the clinically significant cancer focus, capture only a clinically insignificant cancer focus, or completely miss all cancer foci^{20,41}. Thus, the significant sampling error of traditional systematic, random prostate biopsies renders them unreliable for accurate characterization of index tumor location, volume, and GS⁴¹. The recently developed image-guided targeted prostate biopsy technique, which fuses magnetic resonance and three-dimensional transrectal ultrasound images, can reliably identify the location and the primary Gleason pattern of index lesions^{38,39}. By combining image-guided targeted biopsies and our DNA methylation classifier (following further clinical validation), the ability to identify aggressive focus, and subsequently characterize biopsy-detected PC foci more accurately should be enhanced. The ability to determine aggressiveness in a biopsy sample mapped to a particular prostate location should lead to the ability to make more informed clinical decisions regarding the choice between active surveillance of non-aggressive PC foci and surgery or targeted focal ablation therapy of the aggressive PC foci. Initially, the aggressiveness classifier should be developed into a more cost- and labor efficient test in the form of a custom DNA methylation array or multiplexed PCR-based assay (MSP or MethyLight)^{42,52}.

TABLE 4
Sequences of Probes

| | | | | | | INFIN- | |
|---|---|---|---|---|---|---|---|
| | | | | | | IUM_ | |
| SEQ | | | | RELATION_TO_ | | DE- | |
| ID | | UCSC_REFGENE_ | UCSC_REFGENE_ | UCSC_CPG | | SIGN_ | CHROMOSOME_ |
| NO: | TargetID | NAME | GROUP | ISLAND | ENHANCER | TYPE | 36 |
| 1 | cg00017221 | | | Island | NA | I | 1 |
| 2 | cg00018845 | | | Island | NA | II | 14 |
| 3 | cg00021256 | FEV | Body | N_Shore | TRUE | II | 2 |
| 4 | cg00036011 | HIST1H3G; HIST1H2 | TSS200; TSS1500 | N_Shore | NA | II | 6 |
| | | BI | | | | | |
| 5 | cg00046499 | GPR149 | Body | N_Shore | TRUE | II | 3 |
| 6 | cg00055529 | FBX047 | TSS200 | | NA | II | 17 |
| 7 | cg00063174 | WDR69 | TSS200 | Island | TRUE | I | 2 |
| 8 | cg00074145 | ONECUT1 | Body | N_Shore | NA | I | 15 |
| 9 | cg00083018 | | | N_Shore | NA | II | 6 |
| 10 | cg00087368 | SIM1 | Body | N_Shore | TRUE | II | 6 |
| 11 | cg00088183 | | | Island | NA | II | 1 |
| 12 | cg00107682 | | | Island | NA | II | 15 |
| 13 | cg00107772 | | | Island | NA | II | 14 |
| 14 | cg00114913 | LONRF3; LONRF3 | TSS1500; TSS1500 | Island | NA | I | X |
| 15 | cg00116265 | ZNF673; ZNF673; ZNF; | TSS1500; TSS1500 | N_Shore | NA | II | X |
| | | 63; ZNF673 | TSS1500; TSS150 | | | | |
| | | | 0 | | | | |
| 16 | cg00121904 | MAOB | TSS200 | Island | NA | II | X |
| 17 | cg00152008 | DMRTA2 | TSS200 | Island | NA | I | 1 |
| 18 | cg00153106 | | | Island | TRUE | II | 5 |
| 19 | cg00154357 | ZIC4; ZIC4; ZIC4; ZIC4 | Body; TSS1500; Bo | Island | NA | I | 3 |
| | | ; ZIC4 | dy; Body; TSS1500 | | | | |
| 20 | cg00154455 | ZNF517 | TSS1500 | N_Shore | NA | II | 8 |
| 21 | cg00155526 | NPR3 | Body | Island | NA | II | 5 |
| 22 | cg00158308 | OXGR1 | 5′UTR | N_Shore | TRUE | II | 13 |
| 23 | cg00170003 | NR2E1 | Body | Island | TRUE | II | 6 |
| 24 | cg00178984 | SLC16A7 | 5′UTR | | NA | I | 12 |
| 25 | cg00187981 | | | Island | NA | II | 8 |
| 26 | cg00188409 | | | N_Shore | TRUE | II | X |
| 27 | cg00192136 | DBXI | Body | Island | NA | II | 11 |
| 28 | cg00209038 | LHCGR | 1stExon | Island | TRUE | I | 2 |
| 29 | cg00210994 | C3orf26; FILIP1L; MIR | Body; Body; Body; 5 | N_Shore | NA | II | 3 |
| | | 548G; FILIP1L; FILIP1 | ′UTR; Body | | | | |
| | | L | | | | | |
| 30 | cg00224028 | SEMA3D | Body | | NA | II | 7 |
| 31 | cg00243661 | OR2D2 | 1stExon | | NA | II | 11 |
| 32 | cg00262621 | MMP23B | TSS1500 | Island | TRUE | II | 1 |
| 33 | cg00268840 | ALX4 | TSS1500 | Island | NA | I | 11 |
| 34 | cg00287829 | GRIN2A; GRIN2A; GR | TSS1500; 5′UTR; T | Island | NA | I | 16 |
| | | IN2A | SS200 | | | | |
| 35 | cg00296121 | FRMD4A | Body | N_Shore | NA | II | 10 |
| 36 | cg00326231 | CLTCL1; CLTCL1 | Body; Body | N_Shore | NA | II | 22 |
| 37 | cg00329697 | PTCH2 | 3′UTR | | TRUE | I | 1 |
| 38 | cg00332937 | | | Island | NA | I | 5 |
| 39 | cg00338801 | | | S_Shore | TRUE | II | 1 |
| 40 | cg00347563 | G1PC2; G1PC2 | 1stExon; 5′UTR | Island | NA | I | 1 |
| 41 | cg00348762 | DKFZP434H168; GNA | Body; Body; Body | S_Shore | NA | II | 16 |
| | | 01; GNA01 | | | | | |
| 42 | cg00352218 | | | N_Shore | NA | II | 6 |
| 43 | cg00360610 | SNRNP200 | Body | N_Shore | NA | II | 2 |
| 44 | cg00369477 | HTR2C; HTR2C | 5′UTR; 1stExon | Island | TRUE | II | X |
| 45 | cg00369811 | | | Island | TRUE | I | 6 |
| 46 | cg00374016 | | | Island | NA | II | 15 |
| 47 | cg00377070 | PLXNA4 | 3′UTR | | NA | II | 7 |
| 48 | cg00379648 | RFX4 | Body | Island | TRUE | I | 12 |
| 49 | cg00380985 | TCEAL6 | 5′UTR | N_Shore | NA | I | X |
| 50 | cg00400448 | | | N_Shore | TRUE | I | 15 |
| 51 | cg00407329 | SIM1 | Body | N_Shore | NA | II | 6 |
| 52 | cg00422120 | FEV | Body | N_Shore | TRUE | II | 2 |
| 53 | cg00423153 | SPHKAP; SPHKAP | TSS1500; TSS1500 | S_Shore | NA | I | 2 |
| 54 | cg00433861 | DOK6 | Body | Island | NA | II | 18 |
| 55 | cg00436476 | HIST1H4F | TSS200 | N_Shore | NA | I | 6 |
| 56 | cg00444390 | ORIOA6 | TSS200 | | NA | II | 11 |
| 57 | cg00463631 | GRIA2; GRIA2; GRIA2 | Body; Body; Body | Island | NA | I | 4 |
| 58 | cg00465476 | DUOX2; DUOX2 | TSS200; TSS200 | Island | NA | I | 15 |
| 59 | cg00466108 | DNAJC6 | Body | Island | TRUE | I | 1 |
| 60 | cg00474723 | ME3; ME3; ME3; ME3 | TSS200; TSS200; 1s | Island | NA | I | 11 |
| | | | tExon; 5′UTR | | | | |
| 61 | cg00478361 | | | Island | NA | II | 1 |
| 62 | cg00507135 | ACBD5; ACBD5; ACB | Body; Body; Body | N_Shore | NA | II | 10 |
| | | D5 | | | | | |
| 63 | cg00514609 | CRYAB; HSPB2 | TSS1500; TSS200 | | TRUE | I | 11 |
| 64 | cg00527440 | THAP4; THAP4 | Body; Body | Island | NA | II | 2 |
| 65 | cg00538458 | | | Island | NA | II | 16 |
| 66 | cg00554969 | TBX22; TBX22; TBX2 | Body; 5′UTR; Body | | NA | I | X |
| | | 2 | | | | | |
| 67 | cg00574740 | LMO7 | Body | Island | NA | II | 13 |
| 68 | cg00594129 | EBF1 | Body | Island | TRUE | II | 5 |
| 69 | cg00610991 | SLC8A1 | 5′UTR | N_Shore | NA | II | 2 |
| 70 | cg00613562 | SULF1; SULF1; SULF1 | 5′UTR; 1stExon; 1st | | TRUE | II | 8 |
| | | ; SULF1 | Exon; 5′UTR | | | | |
| 71 | cg00619126 | | | Island | NA | I | 2 |
| 72 | cg00625334 | C18orf34; C18orf34 | TSS200; TSS1500 | Island | NA | I | 18 |
| 73 | cg00626702 | FAM53A | Body | S_Shore | TRUE | I | 4 |
| 74 | cg00641409 | FLJ22536 | Body | Island | NA | I | 6 |
| 75 | cg00646019 | | | Island | NA | I | 15 |
| 76 | cg00653387 | PTN; PTN | 5′UTR; 1stExon | | NA | II | 7 |
| 77 | cg00663077 | ZFP42 | TSS1500 | Island | NA | I | 4 |
| 78 | cg00667647 | | | N_Shore | TRUE | II | 1 |
| 79 | cg00675569 | ALOX5 | Body | Island | TRUE | I | 10 |
| 80 | cg00688681 | | | Island | NA | I | X |
| 81 | cg00697992 | NXPH2 | Body | N_Shore | TRUE | II | 2 |
| 82 | cg00702719 | | | Island | NA | II | 6 |
| 83 | cg00739582 | MIR888; MIR890 | TSS1500; TSS1500 | | NA | II | X |
| 84 | cg00741609 | TLX1 | Body | Island | TRUE | II | 10 |
| 85 | cg00741836 | DOK5 | TSS200 | Island | NA | I | 20 |
| 86 | cg00744866 | CLASP2 | Body | | TRUE | II | 3 |
| 87 | cg00748427 | | | | TRUE | II | 14 |
| 88 | cg00753399 | MOBKL1B | Body | N_Shore | NA | II | 2 |
| 89 | cg00760950 | | | | TRUE | II | 13 |
| 90 | cg00765312 | ALX1 | Body | Island | NA | I | 12 |
| 91 | cg00766845 | NID2 | TSS200 | Island | NA | II | 14 |
| 92 | cg00767395 | | | N_Shore | NA | II | 2 |
| 93 | cg00772407 | DUSP6; DUSP6 | Body; Body | N_Shore | NA | II | 12 |
| 94 | cg00789198 | | | | NA | II | 19 |
| 95 | cg00802478 | RBM47 | 5′UTR | | TRUE | II | 4 |
| 96 | cg00817100 | | | Island | NA | I | 1 |
| 97 | cg00822361 | SSR3 | Body | N_Shore | NA | II | 3 |
| 98 | cg00838898 | | | N_Shore | TRUE | II | 16 |
| 99 | cg00839579 | MEOX2 | TSS1500 | | TRUE | I | 7 |
| 100 | cg00840332 | LEP | TSS200 | Island | NA | I | 7 |
| 101 | cg00850552 | SUMO3 | Body | N_Shore | NA | II | 21 |
| 102 | cg00854166 | EPO | Body | S_Shore | TRUE | II | 7 |
| 103 | cg00862116 | ABCB1 | 5′UTR | S_Shore | NA | II | 7 |
| 104 | cg00864458 | RPS20; RPS20 | Body; 3′UTR | N_Shore | NA | II | 8 |
| 105 | cg00875272 | TAL1; TAL1 | 5′UTR; 1stExon | N_Shore | NA | II | 1 |
| 106 | cg00880452 | SYCN | 1stExon | Island | NA | I | 19 |
| 107 | cg00884221 | IGFBP7 | TSS1500 | Island | NA | II | 4 |
| 108 | cg00893471 | HOXD3 | 5′UTR | Island | NA | II | 2 |
| 109 | cg00910015 | | | | NA | I | 2 |
| 110 | cg00918522 | | | N_Shelf | TRUE | II | 4 |
| 111 | cg00921266 | HOXA3; HOXA3; HO | 5′UTR; 5′UTR; TSS | N_Shore | NA | I | 7 |
| | | XA3 | 200 | | | | |
| 112 | cg00926215 | PAX3; PAX3; PAX3; C | Body; Body; Body; T | N_Shore | NA | I | 2 |
| | | CDC140; PAX3; PAX3; | SS1500; Body; Bod | | | | |
| | | PAX3; PAX3; PAX3 | y; Body; Body; Body | | | | |
| 113 | cg00928167 | | | Island | TRUE | II | 14 |
| 114 | cg00930873 | ALDH1A2; ALDH1A2 | TSS200; TSS200 | Island | TRUE | II | 15 |
| 115 | cg00932276 | EGFL6; EGFL6; EGFL | 5′UTR; 1stExon; 5′U | Island | TRUE | II | X |
| 116 | cg00944193 | NBEA | Body | Island | NA | I | 13 |
| 117 | cg00947032 | SPG20; SPG20; SPG20; | 5′UTR; 5′UTR; 5′UT | Island | NA | II | 13 |
| | | SPG20 | R; 5′UTR | | | | |
| 118 | cg00963378 | GJA3 | Body | Island | NA | I | 13 |
| 119 | cg00971050 | PTRF | Body | Island | NA | I | 17 |
| 120 | cg00980904 | RASSF1; RASSF1; RA | Body; Body; Body; 5 | N_Shore | NA | II | 3 |
| | | SSF1; RASSF1 | ′UTR | | | | |
| 121 | cg00990022 | NT5C1A | TSS1500 | Island | TRUE | II | 1 |
| 122 | cg00996827 | | | | NA | I | 1 |
| 123 | cg01016662 | | | Island | TRUE | I | 1 |
| 124 | cg01019587 | | | Island | NA | II | 7 |
| 125 | cg01025095 | | | | NA | I | 5 |
| 126 | cg01035198 | C6orf141; C6orf141 | 1stExon; 3′UTR | S_Shore | TRUE | II | 6 |
| 127 | cg01042334 | OPLAH | 5′UTR | Island | TRUE | II | 8 |
| 128 | cg01042641 | IFT140 | Body | S_Shore | NA | I | 16 |
| 129 | cg01056242 | GPR133 | Body | N_Shore | NA | I | 12 |
| 130 | cg01063813 | STAT6; STAT6 | 1stExon; 5′UTR | | TRUE | II | 12 |
| 131 | cg01065210 | RER1 | 3′UTR | S_Shore | NA | II | 1 |
| 132 | cg01068023 | | | N_Shore | NA | II | 1 |
| 133 | cg01085837 | | | Island | NA | II | 12 |
| 134 | cg01088410 | | | Island | NA | I | 5 |
| 135 | cg01098812 | | | Island | TRUE | II | 14 |
| 136 | cg01120165 | HDAC10; HDAC10 | TSS1500; TSS1500 | Island | NA | I | 22 |
| 137 | cg01128642 | OSR1 | TSS1500 | S_Shore | NA | I | 2 |
| 138 | cg01135546 | | | Island | NA | I | 17 |
| 139 | cg01138867 | GABRB2; GABRB2 | TSS1500; TSS1500 | S_Shore | NA | I | 5 |
| 140 | cg01167755 | NRG2; NRG2; NRG2; N | Body; Body; Body; | S_Shore | NA | I | 5 |
| | | RG2 | Body | | | | |
| 141 | cg01175020 | TLX1 | Body | Island | NA | I | 10 |
| 142 | cg01186595 | CHORDC1; CHORDC | Body; Body | N_Shore | NA | II | 11 |
| | | 1 | | | | | |
| 143 | cg01203385 | C2orf43 | TSS200 | Island | NA | I | 2 |
| 144 | cg01209023 | FTH1 | Body | N_Shore | NA | II | 11 |
| 145 | cg01218619 | | | Island | TRUE | I | 4 |
| 146 | cg01221209 | | | | NA | I | 5 |
| 147 | cg01245966 | ADCY8 | TSS1500 | Island | NA | II | 8 |
| 148 | cg01258751 | SIMI | TSS1500 | N_Shore | TRUE | II | 6 |
| 149 | cg01272707 | | | Island | NA | I | 6 |
| 150 | cg01291336 | SMARCD3; SMARCD | Body; Body | S_Shore | TRUE | II | 7 |
| | | 3 | | | | | |
| 151 | cg01308827 | ETV2 | TSS200 | N_Shore | NA | I | 19 |
| 152 | cg01309153 | SURF1; SURF2 | TSS1500; Body | S_Shore | NA | II | 9 |
| 153 | cg01348733 | SLFN11; SLFN11; SLF | TSS200; TSS200; T | Island | TRUE | I | 17 |
| | | N11; SLFN11; SLFN11 | SS200; TSS200; TS | | | | |
| | | | S200 | | | | |
| 154 | cg01384143 | C3orf14 | TSS1500 | Island | NA | I | 3 |
| 155 | cg01386424 | | | Island | NA | II | 6 |
| 156 | cg01386978 | PARK2; PARK2; PAR | Body; Body; Body | S_Shore | NA | I | 6 |
| | | K2 | | | | | |
| 157 | cg01404317 | SPG20; SPG20; SPG20; | 5′UTR; 5′UTR; 5′UT | Island | NA | II | 13 |
| | | SPG20 | R; 5′UTR | | | | |
| 158 | cg01410316 | ADAP 1 | Body | N_Shore | NA | II | 7 |
| 159 | cg01413054 | CAB39; CAB39; CAB3 | Body; Body; Body | | NA | II | 2 |
| | | 9 | | | | | |
| 160 | cg01419831 | | | Island | TRUE | I | 2 |
| 161 | cg01419991 | TRIB1 | 3′UTR | | NA | II | 8 |
| 162 | cg01422797 | PRDM13 | TSS1500 | N_Shore | NA | II | 6 |
| 163 | cg01439876 | | | Island | TRUE | I | 1 |
| 164 | cg01443071 | CNP | Body | Island | NA | I | 17 |
| 165 | cg01476568 | C10orf18 | 5′UTR | | TRUE | I | 10 |
| 166 | cg01481159 | | | Island | NA | II | 20 |
| 167 | cg01496199 | | | Island | TRUE | I | 19 |
| 168 | cg01498231 | SPOCK2; SPOCK2 | Body; Body | Island | NA | I | 10 |
| 169 | cg01498900 | ACOT2 | TSS200 | N_Shore | NA | II | 14 |
| 170 | cg01503299 | NOP14 | Body | N_Shore | NA | I | 4 |
| 171 | cg01505767 | LOC284798; LOC2847 | Body; TSS1500; Bo | Island | TRUE | I | 20 |
| | | 98; LOC284798 | dy | | | | |
| 172 | cg01520122 | CCL7 | TSS1500 | | NA | II | 17 |
| 173 | cg01521258 | CACHD1 | Body | S_Shore | NA | II | 1 |
| 174 | cg01533258 | GSC | Body | Island | TRUE | I | 14 |
| 175 | cg01546378 | GALM | TSS200 | | NA | II | 2 |
| 176 | cg01548300 | | | Island | NA | II | 5 |
| 177 | cg01563704 | HIST1H3G; HIST1H2 | TSS1500; TSS1500 | N_Shore | NA | II | 6 |
| | | BI | | | | | |
| 178 | cg01564165 | | | | NA | II | 13 |
| 179 | cg01587682 | PAX6; PAX6; PAX6 | Body; Body; Body | Island | TRUE | II | 11 |
| 180 | cg01589129 | | | Island | TRUE | I | 4 |
| 181 | cg01615475 | | | Island | NA | I | 11 |
| 182 | cg01625087 | | | N_Shore | NA | I | 6 |
| 183 | cg01635555 | | | S_Shore | NA | II | 16 |
| 184 | cg01657186 | NINJ2 | Body | S_Shore | TRUE | I | 12 |
| 185 | cg01661350 | KLHL1; KLHL1; ATX | 1stExon; 5′UTR; Bo | Island | TRUE | II | 13 |
| | | N8OS | dy | | | | |
| 186 | cg01663018 | | | Island | NA | I | 15 |
| 187 | cg01697719 | TBX1; TBX1; TBX1 | Body; Body; Body | Island | TRUE | I | 22 |
| 188 | cg01709619 | | | S_Shore | NA | I | 3 |
| 189 | cg01718742 | CDH8 | TSS200 | Island | NA | I | 16 |
| 190 | cg01735384 | | | Island | NA | I | 6 |
| 191 | cg01737550 | TCEAL6 | 3′UTR | N_Shelf | NA | II | X |
| 192 | cg01738650 | | | | TRUE | II | 6 |
| 193 | cg01751605 | PTN | TSS200 | | NA | II | 7 |
| 194 | cg01754780 | SRC1N1 | Body | Island | TRUE | I | 17 |
| 195 | cg01758418 | SLC7A3; SLC7A3 | TSS1500; TSS1500 | S_Shore | NA | II | X |
| 196 | cg01758512 | FUT9; FUT9 | 5′UTR; 1stExon | Island | NA | I | 6 |
| 197 | cg01759597 | DLX6AS | Body | | NA | I | 7 |
| 198 | cg01765758 | | | Island | NA | II | X |
| 199 | cg01765882 | LOC116437 | Body | | NA | I | 12 |
| 200 | cg01779765 | FLJ43390 | TSS1500 | Island | NA | I | 14 |
| 201 | cg01789478 | NEUROD1 | TSS200 | N_Shelf | TRUE | I | 2 |
| 202 | cg01796225 | CHORDC1; CHORDC | Body; Body | N_Shore | NA | II | 11 |
| | | 1 | | | | | |
| 203 | cg01804193 | | | Island | TRUE | II | 12 |
| 204 | cg01805282 | EYA4; EYA4; EYA4 | 5′UTR; 5′UTR; 5′UT | Island | TRUE | II | 6 |
| | | | R | | | | |
| 205 | cg01810111 | | | | TRUE | II | 6 |
| 206 | cg01814945 | HLA-J; NCRNA00171 | Body; Body | Island | TRUE | I | 6 |
| 207 | cg01816515 | C2orf43 | 5′UTR | Island | NA | II | 2 |
| 208 | cg01819167 | | | | NA | II | 12 |
| 209 | cg01819759 | RNF219 | TSS1500 | S_Shore | NA | II | 13 |
| 210 | cg01832005 | C3orf14 | TSS1500 | Island | NA | II | 3 |
| 211 | cg01832036 | DLX4; DLX4; DLX4 | Body; 5′UTR; 1stEx | Island | NA | I | 17 |
| | | | on | | | | |
| 212 | cg01837719 | FUT9 | TSS1500 | N_Shore | NA | II | 6 |
| 213 | cg01841641 | | | N_Shore | NA | I | 2 |
| 214 | cg01842807 | CYP2W1 | Body | Island | NA | I | 7 |
| 215 | cg01851874 | RUNX1T1; RUNX1T1; | Body; 5′UTR; 1stEx | | TRUE | I | 8 |
| | | RUNX1T1; RUNX1T1 | on; 5′UTR | | | | |
| 216 | cg01866955 | | | Island | NA | I | 6 |
| 217 | cg01871127 | | | N_Shore | NA | II | 2 |
| 218 | cg01872216 | | | Island | TRUE | I | 14 |
| 219 | cg01880908 | TNRC6C; TNRC6C | 3′UTR; 3′UTR | Island | NA | I | 17 |
| 220 | cg01883966 | STK19; STK19; STK19 | TSS200; TSS1500; | N_Shore | NA | II | 6 |
| | | ; DOM3Z | TSS1500; Body | | | | |
| 221 | cg01906055 | NCAPH | TSS1500 | N_Shore | NA | II | 2 |
| 222 | cg01912955 | SIM1 | Body | Island | NA | II | 6 |
| 223 | cg01913196 | DCAF12L1 | TSS200 | S_Shore | NA | I | X |
| 224 | cg01916115 | LAMA2; LAMA2; LA | 5′UTR; 1stExon; 1st | | TRUE | II | 6 |
| | | MA2; LAMA2 | Exon; 5′UTR | | | | |
| 225 | cg01932956 | | | Island | NA | I | 16 |
| 226 | cg01940855 | CHST11 | Body | Island | NA | I | 12 |
| 227 | cg01942318 | | | | TRUE | II | 2 |
| 228 | cg01957088 | HAS2; HAS2AS | 5′UTR; TSS200 | N_Shore | NA | II | 8 |
| 229 | cg01958086 | MEIS2; MEIS2; MEIS2 | Body; Body; Body; | N_Shore | NA | II | 15 |
| | | ; MEIS2; MEIS2; MEIS | Body; Body Body; | | | | |
| | | 2; MEIS2 | Body | | | | |
| 230 | cg01968493 | ZNF804A | TSS1500 | N_Shore | NA | II | 2 |
| 231 | cg01972576 | GML; GML | 5′UTR; 1stExon | Island | NA | I | 8 |
| 232 | cg01978237 | SIM1 | Body | N_Shore | NA | II | 6 |
| 233 | cg01981601 | TOX | TSS1500 | Island | NA | I | 8 |
| 234 | cg01984743 | STC2 | Body | N_Shelf | TRUE | I | 5 |
| 235 | cg01987516 | | | Island | NA | II | 10 |
| 236 | cg01996723 | | | N_Shore | NA | II | X |
| 237 | cg01997272 | | | Island | TRUE | I | 14 |
| 238 | cg01999333 | CASP14 | TSS1500 | | NA | II | 19 |
| 239 | cg02009088 | NRG2; NRG2; NRG2; N | Body; Body; Body; | Island | NA | I | 5 |
| | | RG2 | Body | | | | |
| 240 | cg02025583 | TMEM220 | Body | Island | NA | II | 17 |
| 241 | cg02026062 | FAM162B | Body | Island | NA | I | 6 |
| 242 | cg02029926 | CXCL1 | TSS1500 | N_Shore | NA | II | 4 |
| 243 | cg02053896 | SLC7A3; SLC7A3 | TSS200; TSS200 | S_Shore | NA | II | X |
| 244 | cg02056062 | WWTR1; WWTR1; W | Body; Body; Body | Island | NA | II | 3 |
| | | WTR1 | | | | | |
| 245 | cg02058408 | | | Island | NA | I | 17 |
| 246 | cg02078690 | BSX | TSS200 | Island | TRUE | I | 11 |
| 247 | cg02081266 | | | Island | TRUE | I | 17 |
| 248 | cg02086467 | OTX2 | 5′UTR | Island | NA | I | 14 |
| 249 | cg02099878 | | | N_Shore | NA | I | 2 |
| 250 | cg02100674 | NRG3; NRG3; NRG3 | Body; Body; TSS15 | S_Shore | NA | I | 10 |
| | | | 00 | | | | |
| 251 | cg02120658 | PAX3; PAX3; PAX3; P | Body; Body; Body; | Island | TRUE | I | 2 |
| | | AX3; PAX3; PAX3; PA | Body; Body Body; | | | | |
| | | X3; PAX3 | Body; Body | | | | |
| 252 | cg02134353 | | | Island | NA | II | 6 |
| 253 | cg02142896 | | | | TRUE | II | 14 |
| 254 | cg02144933 | AOX1 | TSS200 | Island | TRUE | II | 2 |
| 255 | cg02160684 | TRIM | Body | S_Shelf | NA | II | 8 |
| 256 | cg02167438 | PAK7; PAK7 | TSS200; TSS200 | Island | TRUE | I | 20 |
| 257 | cg02179029 | RBM41; RBM41 | Body; Body | N_Shelf | NA | II | X |
| 258 | cg02179455 | | | N_Shore | NA | II | 7 |
| 259 | cg02183671 | CD38; CD38 | 1stExon; 5′UTR | Island | NA | I | 4 |
| 260 | cg02192673 | NPFFR2 NPFFR2 | 1stExon; 5′UTR | Island | NA | II | 4 |
| 261 | cg02192855 | HIST1H2BI | TSS200 | N_Shore | NA | II | 6 |
| 262 | cg02197293 | FBXO27; FBXO27 | 5′UTR; 1stExon | Island | NA | I | 19 |
| 263 | cg02215070 | AKR1B1 | TSS200 | Island | NA | I | 7 |
| 264 | cg02231729 | HAPLN3 | 5′UTR | Island | NA | I | 15 |
| 265 | cg02233559 | SLC46A3; SLC46A3 | TSS200; TSS200 | Island | NA | II | 13 |
| 266 | cg02237629 | | | N_Shore | NA | I | 14 |
| 267 | cg02239640 | GSPT2 | 1stExon | S_Shore | NA | II | X |
| 268 | cg02242344 | | | N_Shore | NA | I | 2 |
| 269 | cg02245794 | TACC1; TACC1 | 1stExon; 5′UTR | | TRUE | II | 8 |
| 270 | cg02264082 | | | N_Shore | TRUE | I | 3 |
| 271 | cg02285155 | | | | TRUE | II | 10 |
| 272 | cg02288754 | SALL1; SALL1 | Body; 5′UTR | Island | NA | II | 16 |
| 273 | cg02305242 | FLRT2 | TSS1500 | N_Shore | NA | I | 14 |
| 274 | cg02305377 | | | N_Shelf | NA | I | 12 |
| 275 | cg02366534 | ME1 | TSS200 | Island | NA | II | 6 |
| 276 | cg02388453 | C15orf41; C15orf41 | Body; Body | | TRUE | I | 15 |
| 277 | cg02391441 | | | N_Shore | NA | II | 19 |
| 278 | cg02395819 | | | Island | TRUE | II | 12 |
| 279 | cg02415992 | GRIN2A; GRIN2A; GR | Body; Body; Body | | TRUE | II | 16 |
| | | IN2A | | | | | |
| 280 | cg02430935 | HMX2 | Body | Island | TRUE | I | 10 |
| 281 | cg02432280 | | | Island | NA | II | 7 |
| 282 | cg02433564 | | | Island | TRUE | I | 6 |
| 283 | cg02446647 | EYA4; EYA4; EYA4 | TSS1500; TSS1500 | Island | NA | I | 6 |
| | | | ; TSS1500 | | | | |
| 284 | cg02447304 | | | Island | NA | I | 6 |
| 285 | cg02454806 | LRFN5 | TSS1500 | N_Shore | NA | II | 14 |
| 286 | cg02457328 | | | S_Shelf | NA | II | 12 |
| 287 | cg02457623 | ATP2B4 ATP2B4 | 5′UTR; 5′UTR | S_Shore | NA | I | 1 |
| 288 | cg02460251 | | | Island | NA | I | 5 |
| 289 | cg02489958 | NKX6-1 | Body | N_Shore | NA | II | 4 |
| 290 | cg02490989 | MTMR7 | TSS1500 | S_Shore | NA | II | 8 |
| 291 | cg02493602 | ME3; ME3; ME3 | TSS1500; TSS200; | S_Shore | NA | I | 11 |
| | | | TSS1500 | | | | |
| 292 | cg02509086 | | | N_Shore | NA | II | 8 |
| 293 | cg02523640 | FOXI2 | TSS1500 | Island | NA | I | 10 |
| 294 | cg02532538 | | | Island | NA | I | 17 |
| 7 | cg02533058 | OPRM1; OPRM1; OPR | Body; Body; Body; | S_Shelf | NA | II | 6 |
| | | MI; OPRM1; OPRM1; | Body; Body; Body; | | | | |
| | | OPRM1; OPRM1; OPR | Body; Body; Body; 5 | | | | |
| | | MI; OPRM1; OPRM1; | ′UTR; Body; Body | | | | |
| | | OPRM1; OPRM1 | | | | | |
| 296 | cg02541778 | | | Island | NA | I | 8 |
| 297 | cg02553284 | COL2A1; COL2A1 | Body; Body | N_Shore | NA | I | 12 |
| 298 | cg02560085 | PCDHA6; PCDHA2; P | Body; Body; Body; T | N_Shore | NA | II | 5 |
| | | CDHA1; PCDHA8; PC | SS200; Body; Body; | | | | |
| | | DHA7; PCDHA1; PCD | Body; Body; TSS20 | | | | |
| | | HA6; PCDHA5; PCDH | 0; Body; Body | | | | |
| | | A8; PCDHA3; PCDHA | | | | | |
| | | 4 | | | | | |
| 299 | cg02564134 | ALDHLI | TSS1500 | S_Shore | TRUE | I | 3 |
| 300 | cg02578368 | HIST1H2BH; HIST1H | TSS1500; 1stExon | Island | NA | I | 6 |
| | | 3F | | | | | |
| 301 | cg02590060 | C1orf123 | Body | N_Shore | NA | II | 1 |
| 302 | cg02621287 | | | Island | NA | I | 12 |
| 303 | cg02628016 | KLHL24 | Body | | NA | II | 3 |
| 304 | cg02630214 | | | | NA | I | 3 |
| 305 | cg02637318 | ADAM32; ADAM32 | 1stExon; 5′UTR | Island | NA | I | 8 |
| 306 | cg02644510 | | | S_Shore | NA | I | 7 |
| 307 | cg02647878 | RNF175; RN175 | 5′UTR; 1stExon | Island | NA | I | 4 |
| 308 | cg02656891 | C1orf94; C1orf94 | 5′UTR; TSS200 | Island | NA | I | 1 |
| 309 | cg02707854 | SLC27A1 | Body | S_Shelf | NA | I | 19 |
| 310 | cg02708922 | ADI1 | Body | N_Shore | NA | I | 2 |
| 311 | cg02743222 | TLX3; TLX3 | 5′UTR; 1stExon | Island | NA | I | 5 |
| 312 | cg02757516 | GPR123 | Body | S_Shelf | NA | II | 10 |
| 313 | cg02764478 | SIM1 | Body | N_Shore | NA | II | 6 |
| 314 | cg02766845 | | | Island | NA | I | 6 |
| 315 | cg02796939 | FOXK2 | Body | N_Shore | NA | I | 17 |
| 316 | cg02809746 | | | Island | NA | I | 16 |
| 317 | cg02814558 | PRRG3 | Body | S_Shelf | NA | II | X |
| 318 | cg02818811 | GLIPR1L1 | TSS200 | | NA | I | 12 |
| 319 | cg02839824 | | | N_Shore | NA | II | X |
| 320 | cg02840535 | GTF3C1 | Body | | NA | I | 16 |
| 321 | cg02863073 | SYCN | 1stExon | Island | NA | I | 19 |
| 322 | cg02874376 | DLK1; DLK1 | 1stExon; 5′UTR | Island | NA | I | 14 |
| 323 | cg02879662 | HIF3A; HIF3A | Body; TSS1500 | Island | NA | I | 19 |
| 324 | cg02883150 | | | | NA | II | 2 |
| 325 | cg02883668 | KCNK10 | Body | N_Shore | TRUE | II | 14 |
| 326 | cg02888131 | ALDH1A2; ALDH1A2 | TSS200; TSS200 | Island | TRUE | II | 15 |
| 327 | cg02908900 | MEOX2 | TSS1500 | | TRUE | I | 7 |
| 328 | cg02909790 | HIST1H3G | 1stExon | Island | NA | II | 6 |
| 329 | cg02914422 | PDE1C | 5′UTR | Island | NA | I | 7 |
| 330 | cg02936263 | CCL7 | TSS1500 | | NA | II | 17 |
| 331 | cg02948624 | TBX1; TBX1; TBX1 | TSS1500; TSS1500 | Island | TRUE | II | 22 |
| | | | ; TSS1500 | | | | |
| 332 | cg02961934 | | | | NA | I | 7 |
| 333 | cg02988312 | KIAA1530 | Body | S_Shore | NA | I | 4 |
| 334 | cg03009240 | FZR1 | 5′UTR | S_Shore | NA | I | 19 |
| 335 | cg03012726 | | | N_Shelf | NA | I | 7 |
| 336 | cg03029734 | | | N_Shore | NA | II | 6 |
| 337 | cg03039990 | MIR770; MEG3; MEG3 | TSS1500; Body; Bo | | NA | II | 14 |
| | | ; MEG3 | dy; Body | | | | |
| 338 | cg03045635 | DRD5 | TSS200 | Island | NA | I | 4 |
| 339 | cg03048432 | NIN; NIN; NIN; NIN | 5′UTR; 5′UTR; TSS | | NA | II | 14 |
| | | | 1500; 5′UTR | | | | |
| 340 | cg03051777 | | | S_Shore | TRUE | II | 12 |
| 341 | cg03052128 | | | N_Shelf | NA | II | 12 |
| 342 | cg03094728 | AKAP9; AKAP9 | Body; Body | | TRUE | II | 7 |
| 343 | cg03097389 | TSC22D1; TSC22D1 | 3′UTR; 3′UTR | N_Shelf | TRUE | II | 13 |
| 344 | cg03110310 | ZNF205; ZNF205; MG | Body; Body; Body; | | NA | II | 16 |
| | | C3771; MGC3771 | Body | | | | |
| 345 | cg03131767 | ABCB9; ABCB9; ABC | 5′UTR; 5′UTR; 5′UT | S_Shore | NA | II | 12 |
| | | B9 | R | | | | |
| 346 | cg03142256 | | | S_Shore | NA | II | 3 |
| 347 | cg03158400 | FAM3B; FAM3B | Body; Body | Island | NA | I | 21 |
| 348 | cg03160883 | | | Island | NA | I | 6 |
| 349 | cg03161476 | ATP2B4; ATP2B4 | 5′UTR; 5′UTR | N_Shore | NA | II | 1 |
| 350 | cg03170013 | C2orf85 | TSS200 | N_Shelf | NA | II | 2 |
| 351 | cg03171770 | | | Island | NA | I | 10 |
| 352 | cg03174043 | | | N_Shore | NA | II | 2 |
| 353 | cg03175771 | PRR14 | TSS1500 | N_Shore | NA | I | 16 |
| 354 | cg03177042 | | | S_Shore | NA | I | 6 |
| 355 | cg03177600 | SLITRK3 | 5′UTR | | NA | II | 3 |
| 356 | cg03191045 | | | | NA | I | 20 |
| 357 | cg03195164 | C3orf37; C3orf37 | Body; Body | S_Shore | NA | II | 3 |
| 358 | cg03207574 | PRTFDC1 | Body | Island | NA | I | 10 |
| 359 | cg03209557 | HIST1H2BI; HIST1H2 | 3′UTR; 1stExon | S_Shore | NA | II | 6 |
| | | BI | | | | | |
| 360 | cg03212161 | KIRREL | Body | | TRUE | II | 1 |
| 361 | cg03217795 | PRKCB; PRKCB | 1stExon; 1stExon | Island | NA | I | 16 |
| 362 | cg03221483 | SEPT9; SEPT9; SEPT9 | 5′UTR; Body; TSS1 | | NA | II | 17 |
| | | | 500 | | | | |
| 363 | cg03227021 | | | Island | NA | I | 13 |
| 364 | cg03240800 | PCDHA6; PCDHA2; P | Body; Body; Body; | N_Shore | NA | II | 5 |
| | | CDHA1; PCDHA7; PC | Body; Body; TSS15 | | | | |
| | | DHA1; PCDHA8; PCD | 00; Body; Body; TSS | | | | |
| | | HA6; PCDHA5; PCDH | 1500; Body; Body | | | | |
| | | A8; PCDHA3; PCDHA | | | | | |
| | | 4 | | | | | |
| 365 | cg03241244 | KDM2B; KDM2B | Body; Body | Island | NA | I | 12 |
| 366 | cg03242698 | FLJ41350 | Body | S_Shore | NA | I | 10 |
| 367 | cg03257172 | NR5A2; NR5A2 | Body; Body | N_Shore | NA | I | 1 |
| 368 | cg03276000 | DPP6; DPP6; DPP6 | Body; Body; Body | | NA | II | 7 |
| 369 | cg03278146 | LOC642597 | TSS200 | Island | NA | I | 18 |
| 370 | cg03284392 | | | N_Shore | NA | II | 5 |
| 371 | cg03290400 | SIM1 | Body | N_Shore | TRUE | II | 6 |
| 372 | cg03296575 | | | S_Shelf | NA | II | 16 |
| 373 | cg03307401 | KLK13 | Body | Island | NA | I | 19 |
| 374 | cg03319638 | PLA2G4D | TSS1500 | | NA | II | 15 |
| 375 | cg03321020 | | | | NA | I | 1 |
| 376 | cg03330490 | HHEX | Body | Island | NA | I | 10 |
| 377 | cg03330678 | SEPT9; SEPT9; SEPT9; | 5′UTR; 5′UTR; Bod | | TRUE | II | 17 |
| | | SEPT9 | y; 1stExon | | | | |
| 378 | cg03336402 | EXOC4 | Body | | TRUE | II | 7 |
| 379 | cg03337918 | PLEKHF2 | 5′UTR | S_Shore | NA | II | 8 |
| 380 | cg03347018 | MSC | TSS200 | S_Shore | NA | I | 8 |
| 381 | cg03352106 | KCNJ8 | Body | | NA | I | 12 |
| 382 | cg03361164 | | | Island | NA | II | 6 |
| 383 | cg03362215 | | | S_Shelf | NA | II | 6 |
| 384 | cg03367264 | | | | NA | I | 10 |
| 385 | cg03388193 | HPSE2; HPSE2; HPSE2 | TSS1500; TSS1500 | S_Shore | NA | II | 10 |
| | | ; HPSE2 | ; TSS1500; TSS150 | | | | |
| | | | 0 | | | | |
| 386 | cg03397307 | EFCAB4B; EFCAB4B; | TSS200; TSS200; T | Island | TRUE | I | 12 |
| | | EFCAB4B | SS200 | | | | |
| 387 | cg03401357 | | | Island | NA | I | 1 |
| 388 | cg03420242 | | | Island | NA | II | 16 |
| 389 | cg03423123 | LOC644538 | 1stExon | Island | TRUE | II | X |
| 390 | cg03440272 | | | Island | TRUE | I | X |
| 391 | cg03454250 | | | | TRUE | II | 16 |
| 392 | cg03463076 | | | | TRUE | II | 11 |
| 393 | cg03464366 | | | | NA | II | 2 |
| 394 | cg03464514 | PTN; PTN | 5′UTR; 1stExon | | NA | II | 7 |
| 395 | cg03465499 | MIRGPRF; MRGPRF | TSS1500; TSS1500 | S_Shelf | NA | II | 11 |
| 396 | cg03465513 | | | Island | NA | I | 13 |
| 397 | cg03469862 | | | Island | NA | I | 11 |
| 398 | cg03478497 | C18orf34; C18orf34 | TSS1500; TSS1500 | S_Shore | NA | II | 18 |
| 399 | cg03479715 | FLJ43390 | Body | S_Shore | NA | II | 14 |
| 400 | cg03480698 | PTPRN2; PTPRN2; PT | Body; Body; Body | S_Shelf | NA | I | 7 |
| | | PRN2 | | | | | |
| 401 | cg03506640 | FLRT2 | 5′UTR | Island | NA | I | 14 |
| 402 | cg03512414 | RIN2 | Body | | TRUE | II | 20 |
| 403 | cg03520644 | COL11A1; COL11A1; | TSS1500; TSS1500 | | TRUE | I | 1 |
| | | COL11A1; COL11A1 | ; TSS1500; TSS150 | | | | |
| | | | 0 | | | | |
| 404 | cg03520938 | FAMI60B2 | 3′UTR | | NA | I | 8 |
| 405 | cg03522150 | C22orf49; C22orf49; C1 | Body; Body; Body; | | TRUE | II | 11 |
| | | 1orf49; C11orf49 | Body | | | | |
| 406 | cg03533858 | MORN1; RER1 | TSS1500; 5′UTR | S_Shore | NA | II | 1 |
| 407 | cg03539016 | | | | NA | I | 1 |
| 408 | cg03554749 | | | Island | NA | II | 4 |
| 409 | cg03558222 | | | Island | TRUE | II | X |
| 410 | cg03568017 | SEPT9; SEPT9; SEPT9 | 5′UTR; TSS200; Bo | | TRUE | II | 17 |
| | | | dy | | | | |
| 411 | cg03572772 | PCDHB15 | TSS1500 | N_Shore | NA | I | 5 |
| 412 | cg03583111 | DES | 1stExon | Island | NA | II | 2 |
| 414 | cg03598731 | | | Island | TRUE | I | 8 |
| 415 | cg03602500 | KIR3DX1 | Body | | NA | II | 19 |
| 416 | cg03616377 | | | Island | TRUE | II | 14 |
| 417 | cg03660500 | LHX9; LHX9 | Body; Body | Island | NA | II | 1 |
| 418 | cg03668718 | SLFN11; SLFN11; SLF | TSS1500; TSS1500 | Island | TRUE | I | 17 |
| | | N11; SLFN11; SLFN11 | ; TSS1500; TSS150 | | | | |
| | | | 0; TSS1500 | | | | |
| 419 | cg03671802 | RAX | TSS1500 | Island | NA | II | 18 |
| 420 | cg03679755 | | | Island | NA | I | 10 |
| 421 | cg03683587 | SHROOM4; SHROOM | TSS200; TSS200 | Island | NA | I | X |
| | | 4 | | | | | |
| 422 | cg03693842 | GABRA3 | TSS1500 | | NA | II | X |
| 423 | cg03704673 | GLTPD2; GLTPD2 | 5′UTR; 1stExon | Island | NA | I | 17 |
| 424 | cg03707308 | NRN1 | Body | Island | NA | I | 6 |
| 425 | cg03731268 | LITD1; LITD1 | 5′UTR; 5′UTR | Island | NA | I | 1 |
| 426 | cg03738384 | COTL1 | Body | | NA | I | 16 |
| 427 | cg03752218 | TAL1 | TSS1500 | Island | TRUE | I | 1 |
| 428 | cg03758514 | HIST1H2BI | TSS200 | N_Shore | NA | II | 6 |
| 429 | cg03780486 | OR6A2 | TSS200 | | NA | II | 11 |
| 430 | cg03784083 | OPCML; OPCML | Body; Body | | TRUE | I | 11 |
| 431 | cg03787864 | CYBA | Body | Island | NA | I | 16 |
| 432 | cg03790988 | DOK6 | Body | Island | NA | I | 18 |
| 433 | cg03804500 | ANAPC2; SSNA1 | Body; TSS1500 | N_Shore | NA | II | 9 |
| 434 | cg03815116 | YIPF7 | TSS1500 | | NA | II | 4 |
| 435 | cg03830329 | SIM1 | Body | Island | NA | II | 6 |
| 436 | cg03857553 | NIPSNAP1 | Body | N_Shore | NA | II | 22 |
| 437 | cg03867465 | MGC45800 | Body | Island | NA | I | 4 |
| 438 | cg03880173 | SOX2OT | Body | Island | TRUE | II | 3 |
| 439 | cg03887163 | LMX1A | Body | N_Shore | NA | II | 1 |
| 440 | cg03889013 | | | N_Shore | NA | II | 10 |
| 441 | cg03890037 | LVRN | TSS200 | Island | TRUE | II | 5 |
| 442 | cg03892838 | LRRFIP1; LRRFIP1; L | TSS1500; TSS1500 | N_Shore | NA | I | 2 |
| | | RRF1P1; LRRFIP1; LR | ; TSS1500; TSS150 | | | | |
| | | RFIP1 | 0; Body | | | | |
| 443 | cg03895540 | OR52N2 | TSS200 | | NA | II | 11 |
| 444 | cg03900143 | ZIC4; ZIC4; ZIC4; ZIC4 | Body; TSS1500; Bo | Island | NA | I | 3 |
| | | ; ZIC4 | dy; Body; TSS1500 | | | | |
| 445 | cg03916909 | | | Island | NA | I | 20 |
| 446 | cg03950785 | | | N_Shore | NA | II | X |
| 447 | cg03951374 | MEIS2; MEIS2; MEIS2 | 1stExon; Body; Bod | Island | NA | II | 15 |
| | | ; MEIS2; MEIS2; MEIS | y; 5′UTR; Body; Bod | | | | |
| | | 2; MEIS2 | y; Body | | | | |
| 448 | cg03953660 | | | Island | TRUE | I | 2 |
| 449 | cg03962217 | LOC202781 | Body | S_Shore | NA | II | 7 |
| 450 | cg03966514 | SPG20; SPG20; SPG20; | 5′UTR; 5′UTR; 5′UT | Island | NA | I | 13 |
| | | SPG20 | R; 5′UTR | | | | |
| 451 | cg03981954 | FEZF1; FEZF1 | 3′UTR; 3′UTR | N_Shore | NA | I | 7 |
| 452 | cg03985727 | MEOX2 | TSS1500 | | TRUE | II | 7 |
| 453 | cg03989125 | | | Island | TRUE | I | 22 |
| 454 | cg03999216 | | | Island | NA | II | 2 |
| 455 | cg04003327 | ESPNL; SCLY | TSS1500; 3′UTR | N_Shore | TRUE | II | 2 |
| 456 | cg04003850 | FGF12; FGF12; FGF12 | 5′UTR; 1stExon; Bo | Island | NA | II | 3 |
| | | | dy | | | | |
| 457 | cg04007726 | ZMIZ1 | Body | | NA | I | 10 |
| 458 | cg04011247 | BCAT1; BCAT1 | 1stExon; 5′UTR | 5 Shore | NA | I | 12 |
| 459 | cg04025964 | NR5A2; NR5A2 | Body; Body | Island | NA | I | 1 |
| 460 | cg04041976 | TRIM55; TRIM55; TRI | Body; Body; Body; | N_Shelf | NA | I | 8 |
| | | M55; TRIM55 | Body | | | | |
| 461 | cg04052466 | AMH | Body | Island | NA | I | 19 |
| 462 | cg04058937 | | | Island | NA | I | 15 |
| 463 | cg04066019 | RFTN1 | 5′UTR | Island | NA | I | 3 |
| 464 | cg04093225 | ILDR2 | Body | Island | NA | I | 1 |
| 465 | cg04098866 | | | Island | NA | I | 16 |
| 466 | cg04101806 | AFF3; AFF3 | TSS1500; 5′UTR | S_Shore | TRUE | II | 2 |
| 467 | cg04108939 | BEST4 | Body | Island | TRUE | I | 1 |
| 468 | cg04111071 | TMEM196 | TSS1500 | S_Shore | NA | I | 7 |
| 469 | cg04120272 | FBXO47 | TSS200 | | NA | II | 17 |
| 470 | cg04126266 | PAX7; PAX7; PAX7 | Body; Body; Body | N_Shore | NA | II | 1 |
| 471 | cg04131898 | WIT1 | Body | Island | TRUE | I | 11 |
| 472 | cg04150495 | MIR663 | TSS1500 | Island | NA | I | 20 |
| 473 | cg04151012 | ZNF512 | Body | S_Shore | NA | II | 2 |
| 474 | cg04151062 | | | Island | TRUE | II | 1 |
| 475 | cg04153740 | | | Island | TRUE | II | 16 |
| 476 | cg04156293 | ACHE; ACHE | Body; Body | N_Shore | NA | I | 7 |
| 477 | cg04164058 | | | Island | NA | II | 15 |
| 478 | cg04174091 | | | 5 Shore | NA | II | 11 |
| 479 | cg04177426 | | | Island | NA | I | X |
| 480 | cg04184019 | | | S_Shore | NA | I | 4 |
| 481 | cg04194494 | ALOX5 | Body | Island | NA | I | 10 |
| 482 | cg04195774 | TNFAIP8 | Body | | TRUE | II | 5 |
| 483 | cg04206484 | C7orf50; C7orf50; C7or | Body; Body; Body | S_Shore | TRUE | I | 7 |
| | | f50 | | | | | |
| 484 | cg04215800 | | | Island | TRUE | II | 14 |
| 485 | cg04221650 | LCE4A; LCE4A | 1stExon; 3′UTR | | NA | II | 1 |
| 486 | cg04227631 | GABRA3; MIR767; | 5′UTR; TSS1500; T | | NA | II | X |
| | | M1R105-1 | SS1500 | | | | |
| 487 | cg04244354 | | | N_Shore | TRUE | II | 8 |
| 488 | cg04248271 | EBF1 | Body | Island | TRUE | I | 5 |
| 489 | cg04281464 | | | Island | NA | I | 14 |
| 490 | cg04284140 | POLD2; POLD2 | TSS1500; TSS1500 | S_Shore | NA | II | 7 |
| 491 | cg04285033 | | | Island | TRUE | I | 21 |
| 492 | cg04294888 | TTC28 | Body | | NA | II | 22 |
| 493 | cg04299439 | | | N_Shore | NA | II | 2 |
| 494 | cg04302300 | | | Island | NA | I | X |
| 495 | cg04313756 | TCL1A; TCL1A | TSS1500; TSS1500 | Island | NA | I | 14 |
| 496 | cg04319276 | | | Island | NA | II | 19 |
| 497 | cg04330513 | SFTA3 | TSS1500 | Island | TRUE | I | 14 |
| 498 | cg04337056 | GFM1 | TSS1500 | N_Shore | NA | II | 3 |
| 499 | cg04343891 | PRDM8; PRDM8 | 5′UTR; 1stExon | S_Shore | NA | I | 4 |
| 500 | cg04349243 | SLC16A12 | 5′UTR | Island | TRUE | I | 10 |
| 501 | cg04365202 | LHX9; LHX9 | Body; Body | N_Shore | NA | II | 1 |
| 502 | cg04380340 | AOX1 | TSS1500 | N_Shore | TRUE | II | 2 |
| 503 | cg04388901 | MAP4; MAP4; MAP4 | 5′UTR; 5′UTR; 5′UT | | TRUE | II | 3 |
| 504 | cg04389709 | | | Island | NA | II | 12 |
| 505 | cg04399994 | PAK3; PAK3; PAK3 | 5′UTR; 5′UTR; TSS | N_Shore | NA | II | X |
| | | | 1500 | | | | |
| 506 | cg04401986 | FGF5; FGF5 | Body; Body | S_Shelf | NA | I | 4 |
| 507 | cg04406436 | | | Island | NA | I | 1 |
| 508 | cg04407470 | NR2E1 | Body | Island | TRUE | I | 6 |
| 509 | cg04421553 | VILL | Body | S_Shore | NA | II | 3 |
| 510 | cg04430582 | MIR195; MIR497 | TSS1500; TSS1500 | N_Shelf | NA | II | 17 |
| 511 | cg04452095 | SEPT9; SEPT9; SEPT9; | 5′UTR; 5′UTR; Bod | | TRUE | II | 17 |
| | | SEPT9 | y; 1stExon | | | | |
| 512 | cg04460984 | CHRNB4 | TSS200 | Island | TRUE | I | 15 |
| 513 | cg04461197 | SPATA16 | Body | | TRUE | II | 3 |
| 514 | cg04467162 | | | Island | NA | I | 3 |
| 515 | cg04467618 | TCF21; TCF21 | 1stExon; 1stExon | Island | NA | II | 6 |
| 516 | cg04479219 | SLITRK5 | 5′UTR | Island | NA | II | 13 |
| 517 | cg04498418 | GRIK2; GRIK2; GRIK2 | Body; Body; Body | Island | TRUE | II | 6 |
| 518 | cg04528545 | | | S_Shore | NA | II | X |
| 519 | cg04549333 | ALX4 | Body | Island | TRUE | I | 11 |
| 520 | cg04550052 | SALL1; SALL1; SALL | Body; 5′UTR; 1stEx | Island | NA | I | 16 |
| | | 1 | on | | | | |
| 521 | cg04554272 | LMF1 | Body | N_Shore | NA | I | 16 |
| 522 | cg04560456 | LIN28B; LIN28B | 1stExon; 5′UTR | S_Shelf | NA | II | 6 |
| 523 | cg04560832 | MRPS21; MRPS21 | Body; Body | S_Shore | NA | II | 1 |
| 524 | cg04562217 | ROBO1 | 5′UTR | Island | NA | I | 3 |
| 525 | cg04567738 | | | N_Shore | TRUE | II | 1 |
| 526 | cg04574507 | CD1B | Body | | NA | II | 1 |
| 527 | cg04578774 | ALX4 | TSS1500 | Island | NA | I | 11 |
| 528 | cg04612444 | PENK; PENK | 5′UTR; TSS200 | Island | NA | I | 8 |
| 529 | cg04622802 | FIBIN; FIBIN | 5′UTR; 1stExon | | TRUE | II | 11 |
| 530 | cg04628320 | TBCB | TSS1500 | Island | NA | II | 19 |
| 531 | cg04634417 | PCDHA6; PCDHA2; P | Body; Body; Body; T | N_Shore | NA | II | 5 |
| | | CDHA1; PCDHA8; PC | SS200; Body; Body; | | | | |
| | | DHA7; PCDHA1; PCD | Body; Body; TSS20 | | | | |
| | | HA6; PCDHA5; PCDH | 0; Body; Body | | | | |
| | | A8; PCDHA3; PCDHA | | | | | |
| | | 4 | | | | | |
| 532 | cg04638468 | TMEM155; LOC10019 | TSS200; Body | Island | NA | I | 4 |
| | | 2379 | | | | | |
| 533 | cg04640675 | | | Island | NA | I | 16 |
| 534 | cg04650676 | SEPT9; SEPT9; SEPT9 | 5′UTR; TSS200; Bo | | TRUE | I | 17 |
| | | | dy | | | | |
| 535 | cg04652097 | MAGI2 | TSS1500 | Island | NA | I | 7 |
| 536 | cg04653522 | RAB38 | TSS200 | S_Shore | NA | II | 11 |
| 537 | cg04656042 | | | Island | TRUE | I | 19 |
| 538 | cg04660410 | VILL | Body | S_Shore | NA | II | 3 |
| 539 | cg04670802 | | | N_Shore | NA | I | 6 |
| 541 | cg04688351 | PAX3; PAX3; PAX3; P | Body; Body; Body; | N_Shore | NA | I | 2 |
| | | AX3; PAX3; PAX3 | Body; Body; Body | | | | |
| 542 | cg04692403 | TCF21; TCF21 | 1stExon; 1stExon | Island | NA | II | 6 |
| 543 | cg04698114 | SALL1; SALL1; SALL | Body; 5′UTR; 1stEx | Island | NA | I | 16 |
| | | 1 | on | | | | |
| 544 | cg04701034 | NID2 | TSS1500 | Island | NA | I | 14 |
| 545 | cg04722177 | | | Island | TRUE | I | 19 |
| 546 | cg04723401 | | | | NA | I | 14 |
| 547 | cg04728482 | | | Island | NA | I | 5 |
| 548 | cg04738552 | TUBB4 | TSS1500 | S_Shore | NA | I | 19 |
| 549 | cg04738965 | ZIC1; ZIC1 | 1stExon; 5′UTR | Island | TRUE | I | 3 |
| 550 | cg04761722 | GRIN2A; GRIN2A; GR | 5′UTR; 5′UTR; 5′UT | Island | NA | I | 16 |
| | | IN2A | R | | | | |
| 551 | cg04771206 | POLR1A; PTCD3 | Body; TSS1500 | N_Shore | NA | II | 2 |
| 552 | cg04772683 | KLK10; KLK10; KLK1 | 5′UTR; 5′UTR; 5′UT | Island | NA | I | 19 |
| | | 0 | R | | | | |
| 553 | cg04804377 | RAD51AP2 | TSS200 | | NA | I | 2 |
| 554 | cg04806942 | | | Island | NA | II | 14 |
| 555 | cg04828133 | | | Island | NA | I | 7 |
| 556 | cg04832767 | DLX6AS | Body | N_Shore | NA | I | 7 |
| 557 | cg04846243 | IGF2BP1; IGF2BP1; IG | 1stExon; 1stExon; 5′ | Island | NA | I | 17 |
| | | F2BP1; IGF2BP1 | UTR; 5′UTR | | | | |
| 558 | cg04850731 | NXPH4 | Body | Island | NA | I | 12 |
| 559 | cg04851268 | GHSR; GHSR | TSS1500; TSS1500 | N_Shore | TRUE | II | 3 |
| 560 | cg04859726 | SIM1 | Body | N_Shore | NA | II | 6 |
| 561 | cg04868078 | LHX9; LHX9 | Body; Body | | NA | I | 1 |
| 562 | cg04902729 | CACNA1E | TSS200 | Island | NA | II | 1 |
| 563 | cg04904331 | VWC2 | TSS1500 | Island | NA | I | 7 |
| 564 | cg04910834 | | | | TRUE | II | 8 |
| 565 | cg04911050 | RAB40C | 3′UTR | Island | NA | I | 16 |
| 566 | cg04927889 | FEZF2 | TSS1500 | S_Shore | NA | I | 3 |
| 567 | cg04931126 | | | | TRUE | II | 3 |
| 568 | cg04932340 | | | Island | NA | I | 14 |
| 569 | cg04935434 | | | Island | NA | I | 2 |
| 570 | cg04937184 | BMP4; BMP4 | TSS1500; TSS1500 | S_Shore | NA | I | 14 |
| 571 | cg04954680 | LRRC3B | TSS1500 | N_Shore | NA | II | 3 |
| 572 | cg04958794 | | | Island | NA | II | 14 |
| 573 | cg04961042 | PRKD1 | Body | | TRUE | II | 14 |
| 574 | cg04982193 | C8orf33 | Body | S_Shore | NA | II | 8 |
| 575 | cg05016408 | LOC134466 | TSS200 | Island | NA | I | 5 |
| 576 | cg05019826 | | | | TRUE | I | 15 |
| 577 | cg05024627 | | | | NA | II | 7 |
| 578 | cg05036656 | | | Island | TRUE | II | 4 |
| 579 | cg05042492 | | | N_Shelf | NA | II | 15 |
| 580 | cg05049335 | RIN1; RIN1 | 1stExon; 5′UTR | S_Shore | TRUE | II | 11 |
| 581 | cg05059304 | SYCP2L | TSS200 | N_Shore | NA | I | 6 |
| 582 | cg05060976 | CABYR; CABYR; CA | 3′UTR; 3′UTR; 3′UT | | NA | II | 18 |
| | | BYR; CABYR; CABY | R; 3′UTR; 3′UTR; 3 | | | | |
| | | R; CABYR | UTR | | | | |
| 583 | cg05079544 | N4BP1 | TSS1500 | S_Shore | NA | II | 16 |
| 584 | cg05085500 | | | Island | NA | II | 6 |
| 585 | cg05090759 | SLC38A11 | TSS200 | | NA | I | 2 |
| 586 | cg05099464 | ARHGEF12 | Body | | TRUE | II | 11 |
| 587 | cg05100070 | SIM1 | Body | N_Shore | NA | II | 6 |
| 588 | cg05116382 | ACTN3 | Body | S_Shore | NA | I | 11 |
| 589 | cg05119057 | C14orf23 | Body | S_Shore | NA | I | 14 |
| 590 | cg05128414 | LHX9 | Body | S_Shore | NA | II | 1 |
| 591 | cg05133179 | | | Island | TRUE | I | 11 |
| 592 | cg05134041 | POU3F4 | TSS200 | N_Shore | NA | I | X |
| 593 | cg05135644 | NR2EI | Body | Island | TRUE | II | 6 |
| 594 | cg05137386 | | | N_Shore | NA | I | 14 |
| 595 | cg05143887 | ACSS3 | 1stExon | Island | NA | I | 12 |
| 596 | cg05156137 | RCAN1; RCAN1; RCA | 5′UTR; Body; 1stEx | | TRUE | II | 21 |
| | | N1 | on | | | | |
| 597 | cg05159188 | HIST1H4F | TSS200 | N_Shore | NA | II | 6 |
| 598 | cg05161795 | ZDHHC3; ZDHHC3; E | TSS1500; TSS1500 | S_Shore | NA | II | 3 |
| | | XOSC7; ZDHHC3; EX | ; Body; TSS1500; Bo | | | | |
| | | OSC7 | dy | | | | |
| 599 | cg05162032 | CYTH3 | Body | N_Shore | NA | II | 7 |
| 600 | cg05174942 | VTRNA1-2 | TSS200 | | NA | II | 5 |
| 601 | cg05182265 | UBE3C | Body | S_Shore | TRUE | II | 7 |
| 602 | cg05200373 | SLC39A7; SLC39A7 | Body; Body | S_Shore | NA | II | 6 |
| 603 | cg05210558 | NTM | Body | | NA | II | 11 |
| 604 | cg05211057 | COL9A1; COL9A1 | Body; Body | Island | TRUE | II | 6 |
| 605 | cg05224998 | SLFN11; SLFN11; SLF | TSS200; TSS200; T | N_Shore | TRUE | I | 17 |
| | | N11; SLFN11; SLFN11 | SS200; TSS200; TS | | | | |
| | | | S200 | | | | |
| 606 | cg05239680 | | | | NA | I | X |
| 607 | cg05241828 | GPT | TSS1500 | N_Shore | NA | I | 8 |
| 608 | cg05247035 | | | | TRUE | II | 8 |
| 609 | cg05257528 | PRTN3 | Body | Island | NA | II | 19 |
| 610 | cg05270344 | MAGI2 | TSS1500 | Island | NA | II | 7 |
| 611 | cg05275752 | GALM | TSS200 | | NA | II | 2 |
| 612 | cg05280814 | | | N_Shelf | NA | II | 11 |
| 613 | cg05285429 | ROBO2 | Body | | TRUE | II | 3 |
| 614 | cg05291374 | DIXDC1; DIXDC1 | TSS1500; Body | N_Shore | NA | II | 11 |
| 615 | cg05298458 | TBX1; TBX1; TBX1 | Body; Body; Body | Island | NA | II | 22 |
| 616 | cg05298922 | | | Island | NA | II | 2 |
| 617 | cg05304531 | DHDDS; HMGN2; DH | 3′UTR; TSS1500; 3′ | N_Shore | TRUE | I | 1 |
| | | DDS | UTR | | | | |
| 618 | cg05308504 | | | Island | NA | I | 16 |
| 619 | cg05314639 | | | | NA | II | 13 |
| 620 | cg05327864 | CHRM2; CHRM2; CH | 5′UTR; 5′UTR; 5′UT | Island | TRUE | II | 7 |
| | | RM2; CHRM2; CHRM | R; 5′UTR; 5′UTR; 5′ | | | | |
| | | 2; CHRM2; CHRM2; C | UTR; 5′UTR; 5′UTR | | | | |
| | | HIRM2 | | | | | |
| 621 | cg05339695 | FLJ43390 | Body | S_Shore | NA | II | 14 |
| 622 | cg05345154 | AMH | Body | Island | NA | I | 19 |
| 623 | cg05357932 | ZNRF2 | Body | S_Shore | NA | II | 7 |
| 624 | cg05372242 | SFTA3 | TSS1500 | Island | TRUE | I | 14 |
| 625 | cg05373457 | KCNS2 | 5′UTR | Island | NA | II | 8 |
| 626 | cg05376362 | | | | TRUE | II | 6 |
| 627 | cg05387146 | ME1 | TSS200 | Island | NA | I | 6 |
| 628 | cg05391318 | NR5A2; NR5A2 | Body; Body | Island | NA | I | 1 |
| 629 | cg05393297 | | | N_Shore | TRUE | I | 12 |
| 630 | cg05400200 | MLL5; MLL5 | Body; Body | | NA | II | 7 |
| 631 | cg05414338 | | | N_Shore | NA | II | 6 |
| 632 | cg05446860 | LOC284798; LOC2847 | Body; TSS1500; Bo | Island | TRUE | II | 20 |
| | | 98; LOC284798 | dy | | | | |
| 633 | cg05471509 | | | | NA | II | 13 |
| 634 | cg05482942 | | | Island | NA | I | 10 |
| 635 | cg05493394 | EYA4; EYA4; EYA4 | TSS1500; TSS1500 | N_Shore | NA | II | 6 |
| | | | ; TSS1500 | | | | |
| 636 | cg05494014 | MEOX2 | 1stExon | | NA | I | 7 |
| 637 | cg05496203 | MEIS1 | Body | S_Shelf | NA | II | 2 |
| 638 | cg05500015 | NAALAD2; NAALAD | 5′UTR; 1stExon | | NA | II | 11 |
| | | 2 | | | | | |
| 639 | cg05507490 | | | Island | NA | I | 2 |
| 640 | cg05525812 | | | N_Shore | NA | I | 2 |
| 641 | cg05557266 | DALRD3; DALRD3; N | 5′UTR; TSS1500; T | N_Shore | NA | II | 3 |
| | | DUFAF3; NDUFAF3 | SS1500; TSS1500 | | | | |
| 642 | cg05560435 | | | Island | TRUE | I | 5 |
| 643 | cg05562381 | | | Island | TRUE | I | 17 |
| 644 | cg05576949 | IGF2BP2; IGF2BP 2 | Body; Body | N_Shore | NA | II | 3 |
| 645 | cg05583608 | | | Island | TRUE | I | 16 |
| 646 | cg05626117 | CLEC4G | TSS1500 | S_Shore | NA | II | 19 |
| 647 | cg05648914 | | | | TRUE | II | 5 |
| 648 | cg05658512 | C7orf27 | 5′UTR | N_Shore | NA | II | 7 |
| 649 | cg05663573 | SLC7A14 | 5′UTR | N_Shore | NA | I | 3 |
| 650 | cg05676622 | RBM4 | Body | Island | NA | I | 11 |
| 651 | cg05680973 | HS6ST2; HS6ST2 | Body; Body | N_Shore | NA | II | X |
| 652 | cg05696715 | ABT1 | Body | Island | NA | II | 6 |
| 653 | cg05733181 | | | Island | TRUE | II | 4 |
| 654 | cg05735180 | | | Island | NA | I | 18 |
| 655 | cg05736424 | | | S_Shelf | NA | II | 2 |
| 656 | cg05736768 | DPYS; DPYS | 1stExon; 5′UTR | Island | NA | I | 8 |
| 657 | cg05743346 | CALN1; CALN1 | 5′UTR; Body | Island | NA | II | 7 |
| 658 | cg05755900 | PFDN6; WDR46; WDR | Body; TSS1500; TS | S_Shore | NA | I | 6 |
| | | 46 | S1500 | | | | |
| 659 | cg05768044 | CHD9 | Body | | NA | II | 16 |
| 660 | cg05769889 | DUSP6; DUSP6 | Body; Body | N_Shore | NA | I | 12 |
| 661 | cg05774229 | | | Island | TRUE | I | 11 |
| 662 | cg05783185 | EXT1 | Body | N_Shelf | NA | II | 8 |
| 663 | cg05790451 | APBA2; APBA2 | Body; Body | Island | TRUE | I | 15 |
| 664 | cg05793120 | | | Island | NA | I | 4 |
| 665 | cg05803296 | ATXN7L1; ATXN7L1 | TSS200; Body | | TRUE | II | 7 |
| 666 | cg05852143 | NTF3 | TSS1500 | Island | NA | I | 12 |
| 667 | cg05854114 | | | Island | NA | I | 12 |
| 668 | cg05861639 | KLHL28 | 5′UTR | N_Shelf | NA | II | 14 |
| 669 | cg05894124 | FGF5; FGF5 | TSS1500; TSS1500 | N_Shore | TRUE | II | 4 |
| 670 | cg05901543 | CDH15 | Body | | NA | I | 16 |
| 671 | cg05905176 | TNFAIP8L3 | Body | Island | NA | I | 15 |
| 672 | cg05907046 | ZSWIM2 | TSS200 | Island | TRUE | II | 2 |
| 673 | cg05916684 | | | N_Shore | NA | I | 17 |
| 674 | cg05918002 | ZNF232 | 5′UTR | Island | NA | I | 17 |
| 675 | cg05920909 | LHX9; LHX9 | Body; Body | N_Shore | TRUE | II | 1 |
| 676 | cg05923687 | | | Island | TRUE | I | 1 |
| 677 | cg05937630 | AKR7A3 | TSS1500 | Island | NA | I | 1 |
| 678 | cg05937737 | SLC7A14 | 5′UTR | Island | NA | I | 3 |
| 679 | cg05940231 | TBXI5 | TSS200 | Island | TRUE | I | 1 |
| 680 | cg05940452 | FOXRI; FOXR1 | 5′UTR; 1stExon | Island | NA | I | 11 |
| 681 | cg05944877 | PRKCB; PRKCB | Body; Body | | TRUE | II | 16 |
| 682 | cg05945266 | FOXK2 | Body | N_Shore | NA | II | 17 |
| 683 | cg05982460 | | | S_Shelf | NA | I | 16 |
| 684 | cg05991442 | RECQL5; LOC643008; | Body; Body; 5′UTR | | NA | I | 17 |
| | | LOC643008 | | | | | |
| 685 | cg05994094 | C18orf34; C18orf34 | TSS200; TSS1500 | Island | NA | I | 18 |
| 686 | cg05994320 | | | Island | NA | I | 7 |
| 687 | cg06008926 | | | N_Shore | NA | I | 5 |
| 688 | cg06014401 | EOMES | TSS1500 | Island | NA | II | 3 |
| 689 | cg06022561 | D2HGDH | Body | | NA | I | 2 |
| 690 | cg06022664 | MIR548H4 | Body | | NA | I | 15 |
| 691 | cg06024295 | CPN1; CPN1 | 1stExon; 5′UTR | | NA | II | 10 |
| 692 | cg06025456 | PPT2; PRRT1; PPT2 | TSS1500; TSS1500 | N_Shore | TRUE | I | 6 |
| | | | ; TSS1500 | | | | |
| 693 | cg06038944 | | | | TRUE | II | 2 |
| 694 | cg06057569 | BRD1 | TSS1500 | N_Shore | NA | II | 22 |
| 695 | cg06077978 | PCSK1N | Body | Island | NA | I | X |
| 696 | cg06083330 | POU4F2 | Body | Island | TRUE | I | 4 |
| 697 | cg06087421 | TAL1; TAL1 | 5′UTR; 1stExon | N_Shore | NA | I | 1 |
| 698 | cg06092815 | SPHKAP; SPHKAP | TSS200; TSS200 | Island | NA | II | 2 |
| 699 | cg06108782 | SLC18A3; CHAT; CHA | TSS1500; 1stExon; | Island | NA | II | 10 |
| | | T | 5′UTR | | | | |
| 700 | cg06120122 | | | | TRUE | II | 11 |
| 701 | cg06122635 | | | Island | NA | I | 2 |
| 702 | cg06132727 | | | Island | NA | I | 4 |
| 703 | cg06148685 | LPAR1; LPAR1 | TSS1500; TSS1500 | Island | NA | II | 9 |
| 704 | cg06179765 | GPNMB; GPNMB | Body; Body | Island | TRUE | I | 7 |
| 705 | cg06184669 | GABRB1 | Body | N_Shore | TRUE | II | 4 |
| 706 | cg06193578 | | | Island | TRUE | II | 19 |
| 707 | cg06211837 | ST6GALNAC3; ST6G | 1stExon; 5′UTR; 1st | Island | NA | I | 1 |
| | | ALNAC3; ST6GALNA | Exon; 5′UTR | | | | |
| | | C3; ST6GALNAC3 | | | | | |
| 708 | cg06212263 | | | S_Shore | NA | II | 21 |
| 709 | cg06217046 | WWC3 | Body | Island | NA | II | X |
| 710 | cg06221393 | | | Island | NA | II | 5 |
| 711 | cg06240450 | ALDH1L1 | TSS200 | Island | TRUE | I | 3 |
| 712 | cg06253058 | WWTR1; WWTR1; W | Body; Body; Body | Island | NA | II | 3 |
| | | WTR1 | | | | | |
| 713 | cg06254453 | | | N_Shore | NA | II | 6 |
| 714 | cg06264868 | | | | NA | II | 10 |
| 715 | cg06271630 | | | | NA | II | 10 |
| 716 | cg06271970 | | | Island | NA | I | 15 |
| 717 | cg06274159 | ZFP42 | TSS200 | Island | NA | II | 4 |
| 718 | cg06282524 | | | Island | NA | I | X |
| 719 | cg06284231 | CLEC14A | 1stExon | Island | NA | II | 14 |
| 720 | cg06286796 | PSMD6 | Body | N_Shore | NA | II | 3 |
| 721 | cg06288788 | | | S_Shore | NA | II | 16 |
| 722 | cg06296503 | | | S_Shore | NA | I | 6 |
| 723 | cg06304401 | NLGN1 | 5′UTR | | NA | I | 3 |
| 724 | cg06312254 | SLITRK3 | 5′UTR | | NA | II | 3 |
| 725 | cg06321998 | | | | NA | II | 6 |
| 726 | cg06330323 | TSC2; TSC2; TSC2 | Body; Body; Body | N_Shore | TRUE | I | 16 |
| 727 | cg06356912 | VILL | Body | N_Shore | NA | II | 3 |
| 728 | cg06369992 | | | Island | NA | II | 10 |
| 729 | cg06371502 | | | N_Shore | TRUE | I | 1 |
| 730 | cg06385187 | WFDC2 | TSS200 | Island | NA | I | 20 |
| 731 | cg06388730 | | | Island | NA | II | 7 |
| 732 | cg06401021 | HMGCLL1; HMGCLL | 1stExon; 5′UTR; 1st | Island | TRUE | I | 6 |
| | | 1; HMGCLL1; HMGCL | Exon; 5′UTR | | | | |
| | | L1 | | | | | |
| 733 | cg06404175 | OXT | Body | Island | TRUE | I | 20 |
| 734 | cg06410057 | | | S_Shore | NA | II | 8 |
| 735 | cg06411724 | MBOX2 | Body | | NA | I | 7 |
| 736 | cg06424065 | | | Island | NA | I | 4 |
| 737 | cg06428055 | ELF4; ELF4 | 5′UTR; 5′UTR | Island | NA | II | X |
| 738 | cg06439589 | SSR4 | Body | S_Shore | NA | II | X |
| 739 | cg06444282 | VWA5B1 | Body | Island | NA | I | 1 |
| 740 | cg06465306 | ZNF711 | Body | S_Shelf | NA | II | X |
| 741 | cg06467636 | CNGA2 | 5′UTR | | NA | I | X |
| 742 | cg06470822 | | | Island | TRUE | II | 6 |
| 743 | cg06482019 | | | Island | NA | I | 16 |
| 744 | cg06495961 | DPP6; DPP6 | 1stExon; 5′UTR | Island | NA | II | 7 |
| 745 | cg06503907 | SYCP2L | TSS200 | N_Shore | NA | I | 6 |
| 746 | cg06520675 | FLJ41350 | Body | Island | TRUE | II | 10 |
| 747 | cg06580523 | | | N_Shelf | NA | II | 12 |
| 748 | cg06583549 | IRF2BP1 | 1stExon | Island | TRUE | I | 19 |
| 749 | cg06587521 | LRIG3; LRIG3 | Body; Body | | TRUE | II | 12 |
| 750 | cg06598544 | COL9A3 | 3′UTR | Island | NA | I | 20 |
| 751 | cg06609094 | | | N_Shelf | TRUE | II | 4 |
| 752 | cg06610484 | MCHR2; MCHR2; MC | TSS200; 5′UTR; 1st | Island | TRUE | I | 6 |
| | | HR2 | Exon | | | | |
| 753 | cg06620896 | | | S_Shore | NA | I | 15 |
| 754 | cg06633061 | | | Island | NA | II | 14 |
| 755 | cg06645033 | | | Island | NA | I | 1 |
| 756 | cg06650546 | | | Island | NA | I | X |
| 757 | cg06654901 | PAX1 | Body | Island | NA | II | 20 |
| 758 | cg06660332 | | | Island | TRUE | I | 1 |
| 759 | cg06661450 | LHX9; LHX9 | Body; Body | N_Shore | NA | II | 1 |
| 760 | cg06666008 | PAX6; PAX6; PAX6 | Body; Body; Body | N_Shore | NA | I | 11 |
| 761 | cg06693048 | EYA1 | TSS1500 | | NA | II | 8 |
| 762 | cg06704518 | GATA4 | 5′UTR | Island | NA | II | 8 |
| 763 | cg06711380 | FBXO47 | TSS1500 | | NA | II | 17 |
| 764 | cg06717750 | RAB40C | Body | N_Shelf | NA | I | 16 |
| 765 | cg06720669 | KCNE1L; KCNE1L | 1stExon; 5′UTR | Island | TRUE | I | X |
| 766 | cg06729532 | | | Island | NA | I | 19 |
| 767 | cg06744545 | | | Island | TRUE | I | 2 |
| 768 | cg06747432 | CCDC8; CCDC8 | 1stExon; 5′UTR | Island | NA | I | 19 |
| 769 | cg06755825 | | | Island | NA | II | 15 |
| 770 | cg06759629 | | | Island | TRUE | II | 4 |
| 771 | cg06761424 | KIAA1210 | TSS1500 | Island | NA | II | X |
| 772 | cg06774787 | KLF8; KLF8; KLF8; KL | 5′UTR; 1stExon; 1st | Island | NA | I | X |
| | | F8 | Exon; 5′UTR | | | | |
| 773 | cg06782686 | NID2 | TSS200 | Island | NA | I | 14 |
| 774 | cg06793562 | | | Island | NA | II | 6 |
| 775 | cg06805513 | SLC16A2 | Body | Island | NA | I | X |
| 776 | cg06811467 | ATP8B2; ATP8B2 | TSS1500; 5′UTR | N_Shore | NA | II | 1 |
| 777 | cg06817490 | | | | TRUE | I | 17 |
| 778 | cg06833110 | MEIS1 | Body | Island | NA | I | 2 |
| 779 | cg06836736 | ME1 | TSS1500 | Island | NA | II | 6 |
| 780 | cg06845853 | WIT1 | Body | S_Shore | NA | I | 11 |
| 781 | cg06915321 | ZIC3 | TSS200 | Island | NA | I | X |
| 782 | cg06915773 | PTN | 5′UTR | | NA | II | 7 |
| 783 | cg06916239 | PAX3; PAX3; PAX3; C | Body; Body; Body; 5 | N_Shore | NA | I | 2 |
| | | CDC140; CCDC140; P | ′UTR; 1stExon; Bod | | | | |
| | | AX3; PAX3; PAX3; PA | y; Body; Body; Body | | | | |
| | | X3; PAX3 | ; Body | | | | |
| 784 | cg06930722 | CHST11 | Body | | NA | I | 12 |
| 785 | cg06943420 | MMP23A; MMP23B | TSS1500; TSS1500 | Island | TRUE | I | 1 |
| 786 | cg06943912 | 5LC44A2 | Body | S_Shelf | NA | I | 19 |
| 787 | cg06960356 | KCNQ1; KCNQ1 | Body; Body | Island | NA | I | 11 |
| 788 | cg06962970 | NTM | Body | | TRUE | II | 11 |
| 789 | cg06963233 | ANPEP | 5′UTR | Island | NA | II | 15 |
| 790 | cg06969287 | TTC28 | Body | | TRUE | II | 22 |
| 791 | cg06970190 | | | Island | NA | II | 3 |
| 792 | cg06971227 | AATK | Body | Island | NA | II | 17 |
| 793 | cg06975914 | | | | TRUE | II | 1 |
| 794 | cg06976096 | | | Island | TRUE | II | 3 |
| 795 | cg06982190 | | | Island | NA | II | 7 |
| 796 | cg06991484 | | | S_Shore | NA | II | 8 |
| 797 | cg07017114 | DLA-II | Body | Island | NA | I | 6 |
| 798 | cg07019438 | EGLN3 | Body | Island | NA | I | 14 |
| 799 | cg07022764 | ASPG | Body | Island | NA | II | 14 |
| 800 | cg07034362 | ALDH1L1 | TSS200 | Island | TRUE | I | 3 |
| 801 | cg07035145 | PYGL; PYGL | Body; Body | Island | NA | I | 14 |
| 802 | cg07037019 | OR10J5 | TSS1500 | | NA | II | 1 |
| 803 | cg07037371 | | | | TRUE | I | 4 |
| 804 | cg07039423 | KCP; KCP | Body; Body | Island | NA | I | 7 |
| 805 | cg07044859 | | | Island | NA | I | 10 |
| 806 | cg07045330 | | | Island | NA | II | 3 |
| 807 | cg07050616 | FLJ41350 | Body | Island | TRUE | II | 10 |
| 808 | cg07053014 | SLC29A1; SLC29A1 | TSS200; TSS200 | N_Shore | NA | II | 6 |
| 809 | cg07077013 | | | Island | NA | II | 2 |
| 810 | cg07083818 | KIAA1683; KIAA1683 | TSS1500; TSS1500 | | TRUE | II | 19 |
| | | ; KIAAI683 | ; TSS1500 | | | | |
| 811 | cg07101841 | SEPT9; SEPT9; SEPT9 | 5′UTR; TSS200; Bo | | TRUE | I | 17 |
| | | | dy | | | | |
| 812 | cg07109801 | MIR425; DALRD3; ND | Body; 5′UTR; TSS1 | N_Shore | NA | II | 3 |
| | | UFAF3; NDUFAF3; N | 500; TSS1500; TSS | | | | |
| | | DUFAF3; NDUFAF3 | 1500; TSS1500 | | | | |
| 813 | cg07137955 | | | Island | TRUE | I | 5 |
| 814 | cg07147449 | | | Island | NA | I | 12 |
| 815 | cg07173635 | | | Island | NA | II | 9 |
| 816 | cg07177380 | | | N_Shelf | TRUE | I | 4 |
| 817 | cg07185131 | | | | TRUE | I | 2 |
| 818 | cg07190535 | PDE4D; PDE4D | Body; TSS1500 | Island | TRUE | I | 5 |
| 819 | cg07197785 | | | Island | TRUE | I | 1 |
| 820 | cg07200280 | RFTN1 | 5′UTR | Island | NA | II | 3 |
| 821 | cg07211140 | WT1; WT1; WT1; WT1 | Body; Body; Body; | Island | NA | I | 11 |
| | | | Body | | | | |
| 822 | cg07219542 | GSTM2; GSTM2 | 1stExon; 1stExon | Island | TRUE | I | 1 |
| 823 | cg07239592 | POU6F2; POU6F2 | Body; Body | Island | NA | II | 7 |
| 824 | cg07262247 | PDLIM4; PDLIM4 | Body; Body | Island | NA | I | 5 |
| 825 | cg07271361 | STK19; STKI9; DOM3 | Body; Body; TSS15 | S_Shore | NA | II | 6 |
| | | Z; STK19 | 00; Body | | | | |
| 826 | cg07283795 | | | | TRUE | II | 5 |
| 827 | cg07291445 | | | Island | NA | I | 7 |
| 828 | cg07302069 | HOXA7; HOXA7 | 5′UTR; 1stExon | Island | NA | I | 7 |
| 829 | cg07335294 | SNAP91; SNAP91 | Body; 5′UTR | Island | TRUE | II | 6 |
| 830 | cg07349208 | | | Island | TRUE | I | 4 |
| 831 | cg07367113 | BRD9; BRD9; BRD9 | Body; Body; Body | N_Shore | NA | II | 5 |
| 832 | cg07368796 | | | N_Shore | NA | I | 10 |
| 833 | cg07376381 | LCK; LCK | Body; Body | Island | NA | I | 1 |
| 834 | cg07378762 | MECOM | Body | N_Shelf | TRUE | II | 3 |
| 835 | cg07395354 | MEOX2 | TSS1500 | | TRUE | II | 7 |
| 836 | cg07402669 | APCDD1L | TSS200 | Island | NA | I | 20 |
| 837 | cg07416656 | TLX1 | Body | Island | TRUE | I | 10 |
| 838 | cg07433663 | MEIS2; MEIS2; MEIS2 | 1stExon; Body; Bod | Island | NA | I | 15 |
| | | ; MEIS2; MEIS2; MEIS | y; 5′UTR; Body; Bod | | | | |
| | | 2; MEIS2 | y; Body | | | | |
| 839 | cg07443748 | CCT8L2; CCT8L2 | 1stExon; 5′UTR | | NA | II | 22 |
| 840 | cg07448060 | MAGI2 | TSS1500 | Island | NA | I | 7 |
| 841 | cg07459478 | VOPP1 | Body | | TRUE | I | 7 |
| 842 | cg07475654 | PNKD; TMBIM1 | Body; 5′UTR | | TRUE | II | 2 |
| 843 | cg07485357 | ADCY4 | Body | Island | NA | I | 14 |
| 844 | cg07486252 | ANK2; ANK2; ANK2 | Body; Body; Body | | TRUE | II | 4 |
| 845 | cg07525299 | ASCL2 | TSS1500 | S_Shore | NA | I | 11 |
| 846 | cg07548313 | CD1C | Body | | NA | II | 1 |
| 847 | cg07548607 | ZSWIM2 | TSS200 | Island | TRUE | I | 2 |
| 848 | cg07551545 | FBXO17; FBXO17 | 5′UTR; 1stExon | Island | TRUE | I | 19 |
| 849 | cg07560096 | ME3; ME3; ME3; ME3 | 5′UTR; 1stExon; 5′U | Island | NA | II | 11 |
| | | | TR; 5′UTR | | | | |
| 850 | cg07564962 | | | Island | NA | I | 5 |
| 851 | cg07582955 | KLHL17 | Body | Island | NA | II | 1 |
| 852 | cg07587796 | ENPEP; ENPEP | 1stExon; 5′UTR | N_Shore | NA | II | 4 |
| 853 | cg07603330 | | | Island | NA | I | 11 |
| 854 | cg07620844 | RBM15B | 1stExon | N_Shore | NA | II | 3 |
| 855 | cg07627556 | | | S_Shore | TRUE | I | 11 |
| 856 | cg07629454 | CASR | 5′UTR | Island | NA | I | 3 |
| 857 | cg07641160 | FAM162B; FAM162B | 1stExon; 5′UTR | Island | NA | I | 6 |
| 858 | cg07644368 | CDO1 | TSS1500 | S_Shore | NA | II | 5 |
| 859 | cg07647825 | SLC46A3; SLC46A3 | TSS1500; TSS1500 | S_Shore | NA | II | 13 |
| 860 | cg07662771 | PSMD6 | Body | N_Shore | NA | I | 3 |
| 861 | cg07690882 | | | Island | NA | II | 11 |
| 862 | cg07697177 | C1orf86; LOC1001280 | Body; TSS200; Bod | N_Shore | NA | II | 1 |
| | | 03; C1orf86 | y | | | | |
| 863 | cg07697895 | WNT2; WNT2; WNT2 | Body; 5′UTR; 1stEx | Island | NA | I | 7 |
| | | | on | | | | |
| 864 | cg07702750 | TRIL | TSS200 | Island | NA | I | 7 |
| 865 | cg07758529 | IL1RAPL2 | 5′UTR | S_Shore | NA | I | X |
| 866 | cg07763047 | GABRB2; GABRB2 | 5′UTR; 5′UTR | Island | NA | I | 5 |
| 867 | cg07774424 | | | | NA | II | X |
| 868 | cg07776847 | C4orf49 | Body | Island | NA | II | 4 |
| 869 | cg07777008 | FIBIN; FIBIN | 5′UTR; 1stExon | | TRUE | I | 11 |
| 870 | cg07792478 | MIR124-2 | TSS1500 | Island | NA | I | 8 |
| 871 | cg07809589 | MEIS1 | Body | S_Shelf | NA | II | 2 |
| 872 | cg07810164 | EGFL6; EGFL6 | Body; Body | Island | TRUE | I | X |
| 873 | cg07810726 | EBF1 | Body | N_Shore | NA | II | 5 |
| 874 | cg07811054 | | | | NA | II | 15 |
| 875 | cg07811110 | SLC6A15; SLC6A15; S | TSS1500; TSS1500 | S_Shore | NA | I | 12 |
| | | LC6A15 | ; TSS1500 | | | | |
| 876 | cg07812877 | RGL3; RGL3; CCDC15 | TSS1500; TSS1500 | Island | NA | I | 19 |
| | | 1 | ; 3′UTR | | | | |
| 877 | cg07855639 | CDC42EP1 | 5′UTR | S_Shore | TRUE | I | 22 |
| 878 | cg07863022 | SEPT9; SEPT9; SEPT9 | 5′UTR; Body; TSS1 | | NA | I | 17 |
| | | | 500 | | | | |
| 879 | cg07876898 | CCDC65 | TSS200 | | TRUE | II | 12 |
| 880 | cg07887243 | MAOB | 1stExon | Island | NA | I | X |
| 881 | cg07891531 | | | Island | TRUE | I | 16 |
| 882 | cg07903237 | | | N_Shore | NA | II | 1 |
| 883 | cg07907386 | PHOX2B | Body | Island | TRUE | I | 4 |
| 884 | cg07911353 | KIAA1549; KIAA1549 | Body; Body | | TRUE | II | 7 |
| 885 | cg07915434 | TLX1 | Body | Island | TRUE | I | 10 |
| 886 | cg07916654 | GPR123 | Body | N_Shore | NA | I | 10 |
| 887 | cg07917150 | HOXA3; HOXA3; HO | 5′UTR; TSS1500; 5 | N_Shore | NA | II | 7 |
| | | XA3 | UTR | | | | |
| 888 | cg07921314 | NRF1 | 5′UTR | S_Shore | NA | II | 7 |
| 889 | cg07964113 | RPTOR; RPTOR | Body; Body | Island | NA | I | 17 |
| 890 | cg07965640 | SPAG16; SPAG16 | Body; Body | S_Shore | NA | II | 2 |
| 891 | cg07969619 | | | Island | NA | II | 12 |
| 892 | cg07973435 | SIM1 | Body | Island | NA | I | 6 |
| 893 | cg07976064 | | | Island | NA | I | 11 |
| 894 | cg08008403 | LHX9 | Body | S_Shore | NA | II | 1 |
| 895 | cg08021564 | SPOCK2; SPOCK2 | Body; Body | Island | NA | II | 10 |
| 896 | cg08023416 | IL1RL2 | 5′UTR | Island | TRUE | II | 2 |
| 897 | cg08034379 | WDR69 | TSS200 | Island | TRUE | I | 2 |
| 898 | cg08036309 | | | N_Shore | TRUE | I | 4 |
| 899 | cg08045824 | HOXC12 | Body | S_Shore | NA | I | 12 |
| 900 | cg08048577 | TPP2 | Body | S_Shore | NA | II | 13 |
| 901 | cg08055330 | C9orf86; C9orf86; LOC | Body; Body; TSS15 | S_Shore | NA | II | 9 |
| | | 100131193 | 00 | | | | |
| 902 | cg08084339 | | | | TRUE | II | 11 |
| 903 | cg08084675 | QSER1 | 5′UTR | Island | NA | II | 11 |
| 904 | cg08089364 | | | N_Shelf | NA | II | 6 |
| 905 | cg08100687 | | | Island | TRUE | II | 13 |
| 906 | cg08101036 | HOXA3; HOXA3; HO | 5′UTR; 5′UTR; TSS | N_Shore | NA | I | 7 |
| | | XA3 | 200 | | | | |
| 907 | cg08128826 | LHX9; LHX9 | Body; Body | | NA | I | 1 |
| 908 | cg08140548 | SFRS11 | Body | | NA | I | 1 |
| 909 | cg08141495 | NOL4 | Body | Island | NA | II | 18 |
| 910 | cg08142344 | GSTM2; GSTM2; GST | 5′UTR; 1stExon; 1st | Island | TRUE | II | 1 |
| | | M2; GSTM2 | Exon; 5′UTR | | | | |
| 911 | cg08146483 | LHX8 | Body | Island | NA | I | 1 |
| 912 | cg08151731 | FBN1 | TSS1500 | Island | NA | II | 15 |
| 913 | cg08152546 | | | Island | NA | II | 13 |
| 914 | cg08154107 | ECE2; ECE2; ECE2; EC | Body; Body; Body; | Island | TRUE | I | 3 |
| | | E2 | Body | | | | |
| 915 | cg08158862 | NR5A2; NR5A2 | Body; Body | S_Shore | NA | II | 1 |
| 916 | cg08161323 | CXCL1 | TSS1500 | N_Shore | NA | II | 4 |
| 917 | cg08162372 | BMP4; BMP4 | 5′UTR; 5′UTR | Island | NA | I | 14 |
| 918 | cg08164233 | RFXAP | Body | S_Shore | NA | II | 13 |
| 919 | cg08167951 | PON3 | 1stExon | Island | NA | I | 7 |
| 920 | cg08168585 | | | N_Shelf | NA | II | 16 |
| 921 | cg08168768 | KIAA1210 | TSS1500 | Island | NA | II | X |
| 922 | cg08186341 | SF3B3; SNORD111B | Body; TSS1500 | | NA | I | 16 |
| 923 | cg08188069 | SDR16C6 | TSS1500 | | NA | II | 8 |
| 924 | cg08190858 | | | Island | NA | I | 12 |
| 925 | cg08196032 | | | N_Shore | NA | II | 14 |
| 926 | cg08214060 | NTM; NTM; NTM; NT | Body; Body; Body; | | NA | II | 11 |
| | | M | Body | | | | |
| 927 | cg08217024 | MDGA2 | TSS1500 | Island | NA | I | 14 |
| 928 | cg08231710 | MMP23A; MMP23B | TSS1500; TSS1500 | Island | TRUE | I | 1 |
| 929 | cg08233811 | FLJ22536 | Body | S_Shore | NA | II | 6 |
| 930 | cg08238568 | RGS7 | Body | | TRUE | II | 1 |
| 931 | cg08239375 | SLC4AIAP; SUPT7L | Body; TSS1500 | S_Shore | NA | II | 2 |
| 932 | cg08263589 | | | Island | NA | I | 3 |
| 933 | cg08266417 | AOX1 | TSS200 | Island | TRUE | I | 2 |
| 934 | cg08272731 | LHX8 | Body | Island | NA | I | 1 |
| 935 | cg08320659 | DFE; HFE; DFE; DFE; H | Body; Body; Body; | | TRUE | II | 6 |
| | | FE; DFE; DFE; DFE; HF | Body; Body; Body; | | | | |
| | | E | Body; Body; Body | | | | |
| 936 | cg08322102 | ZEHX4; LOC10019237 | 5′UTR; Body | S_Shore | NA | I | 8 |
| | | 8 | | | | | |
| 937 | cg08332074 | | | Island | NA | II | 16 |
| 938 | cg08344081 | | | Island | NA | I | 6 |
| 939 | cg08348649 | FAM70A; FAM70A; F | Body; Body; Body | N_Shore | NA | II | X |
| | | AM70A | | | | | |
| 940 | cg08350814 | C2orf88; C2orf88; C2or | TSS1500; 5′UTR; T | Island | TRUE | I | 2 |
| | | 188; C2orf88 | SS1500; 5′UTR | | | | |
| 941 | cg08368617 | | | Island | TRUE | I | 6 |
| 942 | cg08368654 | | | Island | TRUE | I | 6 |
| 943 | cg08382235 | TBX1; TBX1; TBX1 | Body; Body; Body | Island | TRUE | I | 22 |
| 944 | cg08387285 | ME3; ME3; ME3 | | | | | |
| | 5′UTR; TSS | Island | NA | I | 11 | 86383252 | GGCAAAGCGA |
| | 200; 5′UTR | | | | | | AACCAAGCCC |
| | | | | | | | TGGAAGCAGA |
| | | | | | | | TCCGGTGCGG |
| | | | | | | | GTGACAGCCG |
| 945 | cg08441803 | SKAPLSKAP1 | Body; Body | | NA | I | 17 |
| 946 | cg08443605 | | | S_Shore | NA | I | 3 |
| 947 | cg08445802 | | | Island | NA | I | 6 |
| 948 | cg08446038 | ITGA2 | Body | | TRUE | II | 5 |
| 949 | cg08455778 | LOC645323 | Body | N_Shore | NA | I | 5 |
| 950 | cg08462988 | | | | TRUE | I | 3 |
| 951 | cg08464190 | CBLN1 | 1stExon | Island | TRUE | I | 16 |
| 952 | cg08474859 | | | Island | NA | I | 4 |
| 953 | cg08477594 | ME3; ME3; ME3; ME3 | TSS200; TSS1500; | Island | NA | II | 11 |
| | | | 1stExon; 5′UTR | | | | |
| 954 | cg08479865 | DRD3; DRD3; DRD3; D | 1stExon; 5′UTR; 1st | | TRUE | II | 3 |
| | | RD3 | Exon; 5′UTR | | | | |
| 955 | cg08487063 | TLX1 | Body | Island | TRUE | I | 10 |
| 956 | cg08513547 | LOC134466 | Body | N_Shelf | NA | II | 5 |
| 957 | cg08516516 | CDO1 | TSS200 | Island | NA | I | 5 |
| 958 | cg08518715 | PARK2; PARK2; PAR | Body; Body; Body | | NA | II | 6 |
| | | K2 | | | | | |
| 959 | cg08521073 | HRK | 3′UTR | N_Shelf | NA | II | 12 |
| 960 | cg08530237 | | | Island | NA | II | 12 |
| 961 | cg08546494 | | | Island | NA | II | 2 |
| 962 | cg08548396 | | | Island | NA | I | 6 |
| 963 | cg08552198 | | | Island | TRUE | II | 16 |
| 964 | cg08553437 | TMEM155; LOC10019 | TSS200; Body | Island | NA | I | 4 |
| | | 2379 | | | | | |
| 965 | cg08554295 | PDE4D; PDE4D | Body; TSS1500 | S_Shore | NA | I | 5 |
| 966 | cg08560874 | HCG4 | Body | Island | NA | II | 6 |
| 967 | cg08567279 | LECT1; LECT1 | Body; Body | Island | TRUE | I | 13 |
| 968 | cg08575537 | EPO | Body | Island | TRUE | I | 7 |
| 969 | cg08585897 | KARS; TERF2IP; KAR | 5′UTR; TSS1500; B | N_Shore | NA | II | 16 |
| | | S | ody | | | | |
| 970 | cg08596308 | ATP6V1G2; NFKB1L1 | TSS1500; Body; Bo | | NA | II | 6 |
| | | ; NFKBIL1; NFKBIL1; | dy; Body; TSS1500; | | | | |
| | | ATP6V1G2; NFKBIL1 | Body | | | | |
| 971 | cg08604097 | NXPH1 | Body | N_Shore | NA | I | 7 |
| 972 | cg08605656 | SLC16A2 | Body | S_Shore | NA | I | X |
| 973 | cg08612384 | DHRS13 | Body | N_Shore | NA | II | 17 |
| 974 | cg08614481 | HTR1B | TSS200 | Island | NA | II | 6 |
| 975 | cg08620044 | LOC645323 | TSS1500 | Island | NA | I | 5 |
| 976 | cg08628006 | | | S_Shelf | NA | I | 13 |
| 977 | cg08673716 | | | Island | NA | II | 3 |
| 978 | cg08691567 | KRT3 | Body | Island | NA | I | 12 |
| 979 | cg08700190 | SRD5A1 | Body | S_Shore | TRUE | II | 5 |
| 980 | cg08726446 | | | Island | TRUE | II | 12 |
| 981 | cg08728495 | | | | NA | I | 12 |
| 982 | cg08736638 | | | N_Shore | NA | II | 20 |
| 983 | cg08760398 | FAM70A; FAM70A; F | Body; Body; Body | N_Shore | NA | II | X |
| | | AM70A | | | | | |
| 984 | cg08767182 | | | Island | NA | II | 5 |
| 985 | cg08772837 | PCDHA7; PCDHAC2; | Body; TSS1500; Bo | N_Shore | NA | II | 5 |
| | | PCDHAl2; PCDHA6; P | dy; Body; Body; Bod | | | | |
| | | CDHA10; PCDHA4; P | y; Body; Body; Body | | | | |
| | | CDHA11; PCDHA8; P | ; Body; Body; Body; | | | | |
| | | CDHA6; PCDHA1; PC | Body; Body; Body; | | | | |
| | | DHA2; PCDHA1; PCD | Body; Body; Body | | | | |
| | | HA9; PCDHA13; PCD | | | | | |
| | | HA5; PCDHAC1; PCD | | | | | |
| | | HA3 PCDHA10 | | | | | |
| 986 | cg08783090 | GABRE; GABRE | 1stExon; 5′UTR | Island | NA | I | X |
| 987 | cg08786077 | QPCT | TSS200 | Island | TRUE | I | 2 |
| 988 | cg08799778 | LMF1 | Body | N_Shelf | NA | II | 16 |
| 989 | cg08812189 | ZIC4; ZIC4; ZIC4; ZIC4 | Body; TSS200; TSS | Island | TRUE | II | 3 |
| | | ; ZIC4 | 200; Body; Body | | | | |
| 990 | cg08814148 | | | Island | TRUE | II | X |
| 991 | cg08827307 | ADAM32 | TSS200 | Island | NA | II | 8 |
| 992 | cg08827358 | BEAN | 5′UTR | Island | NA | II | 16 |
| 993 | cg08832906 | CLEC2L | 1stExon | Island | NA | I | 7 |
| 994 | cg08844169 | TMEM39A | Body | | NA | II | 3 |
| 995 | cg08846245 | SLC39A7; RXRB; SLC | Body; TSS1500; Bo | S_Shore | NA | II | 6 |
| | | 39A7 | dy | | | | |
| 996 | cg08856601 | DNAJC6 | TSS200 | N_Shore | NA | II | 1 |
| 997 | cg08876932 | PHOX2A | TSS1500 | Island | NA | I | 11 |
| 998 | cg08883223 | LHX9; LHX9 | Body; Body | N_Shore | NA | I | 1 |
| 999 | cg08884974 | | | N_Shelf | NA | II | 15 |
| 1000 | cg08886154 | PAX4 | TSS1500 | | NA | II | 7 |
| 1001 | cg08886651 | TBX1; TBX1; TBX1 | TSS1500; TSS1500 | Island | NA | I | 22 |
| | | | ; TSS1500 | | | | |
| 1002 | cg08893839 | | | Island | TRUE | I | 5 |
| 1003 | cg08897924 | CC2D1B | TSS1500 | N_Shore | NA | II | 1 |
| 1004 | cg08898155 | PON3 | TSS1500 | Island | NA | I | 7 |
| 1005 | cg08924203 | MX1; MX1 | 5′UTR; 5′UTR | Island | NA | II | 21 |
| 1006 | cg08925169 | TRIM34; TRIM78P; TR | Body; TSS200; Bod | | NA | II | 11 |
| | | IM34; TRIM34; TRIM6 | y; Body; Body | | | | |
| | | -TRIM34 | | | | | |
| 1007 | cg08947084 | SNORD47; GAS5; SNO | TSS1500; Body; TS | N_Shelf | NA | II | 1 |
| | | RD81; SNORD80 | S1500; TSS200 | | | | |
| 1008 | cg08952506 | AOX1 | TSS200 | Island | TRUE | II | 2 |
| 1009 | cg08954277 | | | S_Shore | NA | I | 4 |
| 1010 | cg08955941 | | | | NA | II | 5 |
| 1011 | cg08958015 | CCDC65; CCDC65 | 1stExon; 5′UTR | | TRUE | II | 12 |
| 1012 | cg08958294 | GRM1; GRM1 | 5′UTR; 5′UTR | N_Shore | NA | I | 6 |
| 1013 | cg08993172 | ALX4 | Body | Island | NA | II | 11 |
| 1014 | cg09006039 | | | | TRUE | II | 4 |
| 1015 | cg09017619 | HOXA7 | TSS200 | Island | NA | I | 7 |
| 1016 | cg09019936 | | | N_Shore | TRUE | II | 2 |
| 1017 | cg09031836 | | | N_Shelf | NA | II | X |
| 1018 | cg09041207 | FBXO31; FBXO31 | TSS1500; Body | Island | NA | II | 16 |
| 1019 | cg09065413 | PTCH2 | 3′UTR | | TRUE | II | 1 |
| 1020 | cg09066883 | PTPRN2; PTPRN2; PT | Body; Body; Body | | NA | I | 7 |
| | | PRN2 | | | | | |
| 1021 | cg09072216 | SPG20; SPG20; SPG20; | 5′UTR; 5′UTR; 5′UT | N_Shore | NA | II | 13 |
| | | SPG20 | R; 5′UTR | | | | |
| 1022 | cg09076431 | LHX9; LHX9 | Body; Body | N_Shore | NA | II | 1 |
| 1023 | cg09080553 | | | N_Shore | NA | I | 7 |
| 1024 | cg09092713 | | | Island | NA | II | X |
| 1025 | cg09094964 | | | | TRUE | I | 12 |
| 1026 | cg09100593 | SMC4; SMC4; MIR16- | Body; Body; TSS20 | S_Shelf | NA | II | 3 |
| | | 2 | 0 | | | | |
| 1027 | cg09109450 | C2orf43 | 5′UTR | Island | NA | II | 2 |
| 1028 | cg09116618 | | | | TRUE | II | 6 |
| 1029 | cg09136346 | | | Island | TRUE | I | 20 |
| 1030 | cg09151979 | | | Island | NA | I | 6 |
| 1031 | cg09159022 | CSMD1 | Body | Island | NA | II | 8 |
| 1032 | cg09171882 | GLIPR1 | TSS200 | | NA | II | 12 |
| 1033 | cg09211763 | COL5A2; COL5A2 | 1stExon; 5′UTR | | NA | II | 2 |
| 1034 | cg09220563 | | | | TRUE | II | 14 |
| 1035 | cg09226388 | BMP4; BMP4; BMP4 | 5′UTR; 5′UTR; TSS | Island | NA | I | 14 |
| | | | 1500 | | | | |
| 1036 | cg09234698 | | | | TRUE | II | 1 |
| 1037 | cg09236658 | | | N_Shore | NA | II | 6 |
| 1038 | cg09238801 | PNMA1; PNMA1 | 1stExon; 3′UTR | N_Shore | NA | I | 14 |
| 1039 | cg09260773 | TBX15 | 5′UTR | N_Shore | NA | II | 1 |
| 1040 | cg09275956 | | | S_Shelf | TRUE | I | 1 |
| 1041 | cg09309208 | | | | TRUE | II | 13 |
| 1042 | cg09327714 | | | Island | NA | I | 1 |
| 1043 | cg09356916 | | | | TRUE | II | 4 |
| 1044 | cg09364020 | | | S_Shore | NA | II | 6 |
| 1045 | cg09372386 | DNAH10 | Body | | NA | II | 12 |
| 1046 | cg09393254 | MCHR2; MCHR2 | TSS200; TSS200 | Island | TRUE | I | 6 |
| 1047 | cg09406238 | MTMR8 | TSS200 | Island | NA | I | X |
| 1048 | cg09411719 | | | | NA | I | 6 |
| 1049 | cg09418984 | MYADM | TSS200 | Island | NA | I | 19 |
| 1050 | cg09423283 | GRM1; GRM1 | 3′UTR; Body | N_Shore | NA | I | 6 |
| 1051 | cg09435415 | DPYS | TSS200 | S_Shore | NA | II | 8 |
| 1052 | cg09441363 | KCNK2; KCNK2; KCN | TSS1500; TSS1500 | Island | NA | I | 1 |
| | | K2 | ; Body | | | | |
| 1053 | cg09443457 | | | S_Shore | NA | II | X |
| 1054 | cg09464206 | CASP8; CASP8; CASP | 5′UTR; 5′UTR; 5′UT | | NA | II | 2 |
| | | 8; CASP8; CASP8 | R; TSS1500; 5′UTR | | | | |
| 1055 | cg09469566 | | | Island | NA | I | 13 |
| 1056 | cg09491897 | RPTOR; RPTOR | Body; Body | Island | NA | I | 17 |
| 1057 | cg09501509 | | | | TRUE | II | 6 |
| 1058 | cg09502069 | DEGS1; DEGS1 | Body; Body | S_Shore | NA | I | 1 |
| 1059 | cg09506473 | PSKH2 | TSS200 | Island | NA | I | 8 |
| 1060 | cg09508289 | | | | TRUE | II | 6 |
| 1061 | cg09519327 | ATG9B; NOS3 | 3′UTR; Body | Island | NA | I | 7 |
| 1062 | cg09521647 | AFF3; AFF3 | TSS1500; 5′UTR | S_Shore | TRUE | II | 2 |
| 1063 | cg09537620 | PAX6; PAX6; PAX6 | Body; Body; Body | Island | NA | I | 11 |
| 1064 | cg09544050 | BAI1 | Body | Island | TRUE | I | 8 |
| 1065 | cg09544728 | PRKAR1B; PRKAR1B | Body; Body; Body; | Island | NA | I | 7 |
| | | ; PRKAR1B; PRKAR1 | Body; Body; Body | | | | |
| | | B; PRKAR1B; PRKAR | | | | | |
| | | 1B | | | | | |
| 1066 | cg09558195 | GRM1; GRM1 | 5′UTR; 5′UTR | Island | NA | I | 6 |
| 1067 | cg09558547 | | | | NA | II | 6 |
| 1068 | cg09577324 | OR1OA2 | TSS200 | | NA | II | 11 |
| 1069 | cg09579623 | | | N_Shelf | NA | II | 6 |
| 1070 | cg09607047 | MIR365-1 | TSS1500 | | TRUE | II | 16 |
| 1071 | cg09610569 | SLITRK2; SLITRK2; S | 5′UTR; 5′UTR; 5′UT | Island | NA | I | X |
| | | LITRK2; SLITRK2 | R; 5′UTR | | | | |
| 1072 | cg09627874 | | | N_Shore | TRUE | I | 12 |
| 1073 | cg09632273 | DDAH2 | Body | Island | NA | I | 6 |
| 1074 | cg09633973 | HIC1 | TSS1500 | Island | NA | I | 17 |
| 1075 | cg09640202 | IMP4 | Body | S_Shore | NA | II | 2 |
| 1076 | cg09645888 | ME3; ME3; ME3; ME3 | TSS200; TSS1500; | Island | NA | II | 11 |
| | | | 1stExon; 5′UTR | | | | |
| 1077 | cg09658429 | | | Island | NA | II | 12 |
| 1078 | cg09670128 | KRT7; KRT7 | 5′UTR; 1stExon | Island | NA | I | 12 |
| 1079 | cg09675542 | | | | TRUE | II | 7 |
| 1080 | cg09704166 | PAX8; PAX8; PAX8; P | Body; Body; Body; | N_Shore | NA | II | 2 |
| | | AX8; PAX8; LOC4408 | Body; Body; Body | | | | |
| | | 39 | | | | | |
| 1081 | cg09715059 | | | | TRUE | II | 6 |
| 1082 | cg09729613 | AOX1 | TSS200 | Island | TRUE | I | 2 |
| 1083 | cg09734791 | MSC | 1stExon | Island | NA | I | 8 |
| 1084 | cg09760963 | RNF175 | Body | Island | NA | I | 4 |
| 1085 | cg09781936 | TBX1; TBX1; TBX1 | Body; Body; Body | N_Shore | NA | II | 22 |
| 1086 | cg09786278 | RGS7 | Body | | TRUE | II | 1 |
| 1087 | cg09789590 | HIF3A; HIF3A | Body; TSS1500 | Island | NA | II | 19 |
| 1088 | cg09806262 | ALOX5 | Body | S_Shore | TRUE | II | 10 |
| 1089 | cg09829319 | GCM2 | TSS200 | N_Shore | NA | II | 6 |
| 1090 | cg09839443 | QPCT | TSS200 | Island | TRUE | II | 2 |
| 1091 | cg09849405 | CMTM1; CMTM1; CM | 3′UTR; 3′UTR; TSS | Island | NA | I | 16 |
| | | TM2; CMTM1; CMTM | 1500; 3′UTR; 3′UTR | | | | |
| | | 1; CMTM1; CMTM1; C | ; 3′UTR; 3′UTR; 3′U | | | | |
| | | MTM1; CMTM1 | TR; 3′UTR | | | | |
| 1092 | cg09866743 | ARPP-21 | 5′UTR | | NA | I | 3 |
| 1093 | cg09871637 | LMO4 | Body | N_Shore | NA | II | 1 |
| 1094 | cg09884341 | LOC645323; LOC6453 | Body; TSS1500 | N_Shore | TRUE | II | 5 |
| | | 23 | | | | | |
| 1095 | cg09903452 | SEPT9; SEPT9; SEPT9 | 5′UTR; Body; TSS1 | | NA | II | 17 |
| | | | 500 | | | | |
| 1096 | cg09919570 | | | Island | NA | I | 16 |
| 1097 | cg09941406 | | | S_Shore | NA | I | 12 |
| 1098 | cg09957864 | GPT | TSS1500 | N_Shore | NA | I | 8 |
| 1099 | cg09970569 | RSPO2 | Body | N_Shore | NA | II | 8 |
| 1100 | cg09970593 | OPRD1 | Body | S_Shore | NA | II | 1 |
| 1101 | cg09971314 | | | | NA | I | 6 |
| 1102 | cg09972569 | | | Island | NA | I | 2 |
| 1103 | cg09979311 | HN1L | Body | S_Shore | NA | I | 16 |
| 1104 | cg09993945 | CCAR1 | Body | S_Shore | NA | II | 10 |
| 1105 | cg10021724 | | | | NA | II | 13 |
| 1106 | cg10042106 | OTX2 | 5′UTR | Island | NA | I | 14 |
| 1107 | cg10050661 | KRT222 | TSS200 | | NA | II | 17 |
| 1108 | cg10054197 | FAM3B; FAM3B | Body; Body | Island | NA | I | 21 |
| 1109 | cg10067182 | HDAC4 | 3′UTR | Island | NA | I | 2 |
| 1110 | cg10069493 | ALOX5 | Body | Island | TRUE | I | 10 |
| 1111 | cg10106804 | GJA4 | TSS200 | Island | NA | I | 1 |
| 1112 | cg10109351 | | | N_Shore | TRUE | I | 3 |
| 1113 | cg10122477 | GLBIL3 | Body | S_Shore | NA | II | 11 |
| 1114 | cg10143323 | | | | TRUE | II | 11 |
| 1115 | cg10143811 | LMO3; LMO3 | 5′UTR; 5′UTR | | NA | I | 12 |
| 1116 | cg10160397 | ME3; ME3; ME3; ME3 | TSS200; TSS1500; | Island | NA | II | 11 |
| | | | 1stExon; 5′UTR | | | | |
| 1117 | cg10174333 | | | | NA | II | 1 |
| 1118 | cg10182317 | CLVS2 | TSS200 | Island | NA | I | 6 |
| 1119 | cg10223827 | NRN1; NRN1 | 5′UTR; 1stExon | Island | TRUE | I | 6 |
| 1120 | cg10233654 | DUSP6; DUSP6 | Body; Body | N_Shore | NA | I | 12 |
| 1121 | cg10244666 | WT1; WT1; WT1; WT1 | Body; Body; Body; | | NA | I | 11 |
| | | | Body | | | | |
| 1122 | cg10249375 | | | Island | TRUE | I | 1 |
| 1123 | cg10259748 | C6orf186 | Body | Island | TRUE | I | 6 |
| 1124 | cg10263682 | SOX2OT | Body | Island | TRUE | I | 3 |
| 1125 | cg10264687 | | | N_Shore | TRUE | II | 16 |
| 1126 | cg10271061 | ATP6V1G2; NFKBIL1 | TSS1500; Body; Bo | | NA | I | 6 |
| | | ; NFKB1L1; NFKBIL1; | dy; Body; TSS1500; | | | | |
| | | ATP6V1G2; NFKBIL1 | Body | | | | |
| 1127 | cg10280007 | FGFR2; FGFR2; FGFR | Body; Body; Body; | | TRUE | II | 10 |
| | | 2; FGFR2; FGFR2; FGF | Body; Body; Body; | | | | |
| | | R2; FGFR2; FGFR2; FG | Body; Body; Body | | | | |
| | | FR2 | | | | | |
| 1128 | cg10289744 | CHL1 | 5′UTR | | TRUE | II | 3 |
| 1129 | cg10303487 | DPYS | 1stExon | Island | NA | I | 8 |
| 1130 | cg10308673 | | | | TRUE | I | 11 |
| 1131 | cg10314133 | C1orf86; LOC1001280 | Body; TSS200; Bod | N_Shore | NA | II | 1 |
| | | 03; C1orf86 | y | | | | |
| 1132 | cg10320410 | | | | NA | I | 7 |
| 1133 | cg10321196 | LOC100303728; SLC2 | Body; TSS1500 | N_Shore | NA | II | X |
| | | 5A5 | | | | | |
| 1134 | cg10327400 | LRFN5 | TSS1500 | N_Shore | NA | II | 14 |
| 1135 | cg10330056 | | | | TRUE | II | 2 |
| 1136 | cg10356187 | | | Island | TRUE | II | 12 |
| 1137 | cg10375078 | | | Island | TRUE | I | 10 |
| 1138 | cg10375890 | | | Island | NA | I | 1 |
| 1139 | cg10377903 | | | Island | NA | I | 10 |
| 1140 | cg10383428 | NCAPD2 | 5′UTR | S_Shore | NA | II | 12 |
| 1141 | cg10393598 | | | Island | NA | I | 6 |
| 1142 | cg10397527 | HLA-DOA | Body | S_Shore | NA | I | 6 |
| 1143 | cg10401362 | DNAJB6 | Body | | NA | II | 7 |
| 1144 | cg10417567 | NKX6-1 | Body | Island | TRUE | I | 4 |
| 1145 | cg10435816 | PCDHGA4; PCDHGA | Body; Body; Body; | Island | NA | I | 5 |
| | | 9; PCDHGA1; PCDHG | Body; TSS200; Bod | | | | |
| | | B1; PCDHGB7; PCDH | y; Body; TSS200; Bo | | | | |
| | | GB6; PCDHGB3; PCD | dy; Body; Body; Bod | | | | |
| | | HGB7; PCDHGA6; PC | y; Body; Body; Body | | | | |
| | | DHGA8; PCDHGA10; | ; Body; Body; Body | | | | |
| | | PCDHGA5; PCDHGB4 | | | | | |
| | | ; PCDHGA3; PCDHGA | | | | | |
| | | 2; PCDHGB2; PCDHG | | | | | |
| | | A7; PCDHGB5 | | | | | |
| 1146 | cg10440696 | OR52N1 | 1stExon | | NA | II | 11 |
| 1147 | cg10443049 | NXPHI | Body | N_Shore | NA | II | 7 |
| 1148 | cg10446179 | GJA1 | 5′UTR | | NA | II | 6 |
| 1149 | cg10453019 | GALNTL2; GALNTL2 | 5′UTR; 1stExon | | TRUE | II | 3 |
| 1150 | cg10483275 | CAMK2A; CAMK2A; | 5′UTR; 1stExon; 5′U | | NA | II | 5 |
| | | CAMK2A; CAMK2A | TR; 1stExon | | | | |
| 1151 | cg10499172 | DCPS | TSS1500 | N_Shore | NA | II | 11 |
| 1152 | cg10504392 | | | | TRUE | I | 12 |
| 1153 | cg10512745 | DMIRTA2 | Body | Island | NA | I | 1 |
| 1154 | cg10513702 | NR5A2; NR5A2 | Body; Body | N_Shore | NA | I | 1 |
| 1155 | cg10519368 | PCDHA6; PCDHA2; P | Body; Body; Body; | N_Shore | NA | II | 5 |
| | | CDHA1; PCDHA9; PC | Body; Body; Body; | | | | |
| | | DHA7; PCDHA1; PCD | Body; TSS200; Bod | | | | |
| | | HA6; PCDHA10; PCD | y; Body; Body; TSS2 | | | | |
| | | HA5; PCDHA3; PCDH | 00; TSS200; Body | | | | |
| | | A4; PCDHA10; PCDH | | | | | |
| | | A10; PCDHA8 | | | | | |
| 1156 | cg10552126 | DPP6; DPP6; DPP6 | TSS1500; Body; Bo | Island | TRUE | I | 7 |
| | | | dy | | | | |
| 1157 | cg10558887 | SPG20; SPG20; SPG20; | 5′UTR; 5′UTR; 5′UT | N_Shore | NA | I | 13 |
| | | SPG20 | R; 5′UTR | | | | |
| 1158 | cg10578938 | CYFIP2; CYFIP2; CYF | 5′UTR; TSS1500; 5 | S_Shore | TRUE | II | 5 |
| | | IP2 | UTR | | | | |
| 1159 | cg10583997 | BIRC6 | Body | S_Shore | NA | II | 2 |
| 1160 | cg10593416 | | | Island | NA | II | X |
| 1161 | cg10600889 | FBXO47 | TSS200 | | NA | II | 17 |
| 1162 | cg10603290 | TRIO | Body | | TRUE | II | 5 |
| 1163 | cg10606490 | C11orf88; C11orf88 | TSS200; TSS200 | Island | NA | I | 11 |
| 1164 | cg10613701 | | | N_Shore | NA | II | 8 |
| 1165 | cg10633601 | TAL1 | TSS1500 | Island | TRUE | I | 1 |
| 1166 | cg10658542 | SYT10; SYT10 | 1stExon; 5′UTR | Island | NA | I | 12 |
| 1167 | cg10667338 | LIN7B | TSS1500 | N_Shore | NA | I | 19 |
| 1168 | cg10671180 | SNORD115-39 | TSS200 | | NA | II | 15 |
| 1169 | cg10687131 | GDF7 | Body | Island | NA | II | 2 |
| 1170 | cg10696085 | | | | TRUE | I | 12 |
| 1171 | cg10699857 | | | Island | TRUE | II | 4 |
| 1172 | cg10703826 | TBXI5; TBXI5 | 1stExon; 5′UTR | Island | TRUE | I | 1 |
| 1173 | cg10706039 | | | Island | NA | I | X |
| 1174 | cg10719363 | | | N_Shelf | NA | I | 7 |
| 1175 | cg10745499 | SIMI | Body | Island | NA | II | 6 |
| 1176 | cg10747118 | | | S_Shore | NA | I | 3 |
| 1177 | cg10752158 | | | N_Shelf | NA | II | 4 |
| 1178 | cg10758466 | MPP2 | Body | N_Shelf | NA | II | 17 |
| 1179 | cg10776919 | DMRTA2 | TSS1500 | Island | NA | I | 1 |
| 1180 | cg10784570 | | | Island | NA | II | 11 |
| 1181 | cg10785622 | | | N_Shore | NA | II | 4 |
| 1182 | cg10786329 | | | S_Shore | NA | II | X |
| 1183 | cg10799055 | | | | NA | I | 6 |
| 1184 | cg10801213 | SLC7A3; SLC7A3 | 5′UTR; 5′UTR | Island | NA | II | X |
| 1185 | cg10812708 | | | N_Shore | TRUE | I | 6 |
| 1186 | cg10826197 | | | S_Shore | TRUE | I | 8 |
| 1187 | cg10858215 | | | Island | NA | I | 2 |
| 1188 | cg10862468 | CYP2E1 | Body | Island | NA | II | 10 |
| 1189 | cg10864074 | EPO | TSS1500 | Island | TRUE | I | 7 |
| 1190 | cg10876767 | SORCS2 | Body | | NA | I | 4 |
| 1191 | cg10888031 | ACTRT2 | 1stExon | Island | NA | I | 1 |
| 1192 | cg10893095 | | | | NA | I | 6 |
| 1193 | cg10911913 | SLFN11; SLFN11; SLF | TSS200; TSS200; T | N_Shore | TRUE | II | 17 |
| | | N11; SLFN11; SLFN11 | SS200; TSS200; TS | | | | |
| | | | S200 | | | | |
| 1194 | cg10923838 | CIT | Body | S_Shore | TRUE | II | 12 |
| 1195 | cg10948359 | ME1; ME1 | 5′UTR; 1stExon | Island | NA | I | 6 |
| 1196 | cg10950028 | GSTM1; GSTM1 | Body; Body | S_Shore | NA | I | 1 |
| 1197 | cg10959711 | S100A6 | TSS1500 | S_Shore | NA | I | 1 |
| 1198 | cg11029716 | | | | TRUE | II | 14 |
| 1199 | cg11035122 | MIR758; MIR329-2; | TSS1500; TSS1500 | | NA | II | 14 |
| | | M1I329-1; MIR323 | ; TSS1500; TSS200 | | | | |
| 1200 | cg11044163 | CPVL; CPVL | TSS200; TSS200 | | TRUE | II | 7 |
| 1201 | cg11062466 | | | N_Shore | NA | I | 8 |
| 1202 | cg11062848 | NOL7 | Body | S_Shore | NA | II | 6 |
| 1203 | cg11071926 | NHLH2; NHLH2 | 3′UTR; 3′UTR | N_Shore | NA | II | 1 |
| 1204 | cg11120913 | C3orf14 | TSS1500 | N_Shore | NA | II | 3 |
| 1205 | cg11143193 | | | N_Shelf | NA | II | 12 |
| 1206 | cg11144753 | | | Island | TRUE | I | 14 |
| 1207 | cg11145160 | CLDN11 | TSS1500 | Island | NA | I | 3 |
| 1208 | cg11151395 | MPO | Body | Island | NA | I | 17 |
| 1209 | cg11166197 | GABRA3; MIR105-1 | 5′UTR; TSS1500 | | NA | II | X |
| 1210 | cg11171221 | | | S_Shore | NA | I | 10 |
| 1211 | cg11194545 | NRK; NRK | 5′UTR; 1stExon | Island | NA | I | X |
| 1212 | cg11195360 | OR8B8 | TSS1500 | | NA | II | 11 |
| 1213 | cg11207307 | SLC2A14 | TSS200 | Island | NA | I | 12 |
| 1214 | cg11220565 | | | N_Shore | TRUE | I | 20 |
| 1215 | cg11229513 | PRDM14 | TSS1500 | Island | NA | I | 8 |
| 1216 | cg11231249 | CTNNA2; LARTM1; C | Body; TSS200; Bod | Island | NA | II | 2 |
| | | TNNA2 | y | | | | |
| 1217 | cg11237792 | TTC30A | TSS1500 | S_Shore | NA | II | 2 |
| 1218 | cg11241627 | FERD3L | TSS200 | S_Shore | TRUE | II | 7 |
| 1219 | cg11258089 | PDE4D; PDE4D | Body; TSS200 | Island | TRUE | I | 5 |
| 1220 | cg11268834 | MRPL44 | Body | S_Shore | NA | II | 2 |
| 1221 | cg11269103 | ZNF215 | Body | | NA | II | 11 |
| 1222 | cg11274314 | | | Island | NA | I | 2 |
| 1223 | cg11284797 | | | Island | NA | I | 11 |
| 1224 | cg11309496 | SLFN11; SLFN11; SLF; | TSS1500; TSS1500 | Island | TRUE | I | 17 |
| | | N11; SLFN11; SLFN11 | TSS1500; TSS150 | | | | |
| | | | 10; TSS1500 | | | | |
| 1225 | cg11312408 | PCDH17 | 1stExon | Island | NA | II | 13 |
| 1226 | cg11323198 | CDH8 | 5′UTR | Island | NA | II | 16 |
| 1227 | cg11337289 | DZIP1; DZ1P1 | Body; Body | Island | TRUE | II | 13 |
| 1228 | cg11337915 | HIMGN1 | Body | N_Shore | NA | II | 21 |
| 1229 | cg11347582 | | | Island | NA | I | 6 |
| 1230 | cg11367159 | | | | TRUE | II | 12 |
| 1231 | cg11382963 | MSC | 3′UTR | Island | NA | I | 8 |
| 1232 | cg11386025 | KCNQ4; KCNQ4 | Body; Body | Island | TRUE | I | 1 |
| 1233 | cg11389889 | NOP56; NOP56; SNOR | Body; Body; Body; T | S_Shore | NA | II | 20 |
| | | D110; SNORA51 | SS 1500 | | | | |
| 1234 | cg11401794 | NKD2 | Body | | NA | I | 5 |
| 1235 | cg11409022 | ST3GAL3; ST3GAL3; | Body; Body; Body; | | TRUE | II | 1 |
| | | ST3GAL3; ST3GAL3; | Body; Body; Body; | | | | |
| | | ST3GAL3; ST3GAL3; | Body; Body; Body; | | | | |
| | | ST3GAL3; ST3GAL3; | Body | | | | |
| | | ST3GAL3; ST3GAL3 | | | | | |
| 1236 | cg11410682 | PNMAL2 | TSS200 | Island | NA | I | 19 |
| 1237 | cg11412129 | | | S_Shore | NA | I | 1 |
| 1238 | cg11412853 | | | N_Shore | TRUE | II | 12 |
| 1239 | cg11416384 | KIAA1239 | 1stExon | Island | NA | I | 4 |
| 1240 | cg11431957 | VILL | Body | Island | NA | II | 3 |
| 1241 | cg11432962 | | | Island | TRUE | II | 13 |
| 1242 | cg11433319 | CHODL | Body | Island | NA | I | 21 |
| 1243 | cg11435506 | PON3 | TSS1500 | Island | NA | I | 7 |
| 1244 | cg11439596 | | | Island | NA | I | 5 |
| 1245 | cg11452329 | | | | NA | I | 6 |
| 1246 | cg11458217 | LOC644538; LOC6445 | 1stExon; 5′UTR | Island | TRUE | I | X |
| | | 38 | | | | | |
| 1247 | cg11459603 | HIST1H2BI | 1stExon | Island | NA | II | 6 |
| 1248 | cg11460714 | | | | NA | II | 7 |
| 1249 | cg11471772 | SIM1 | TSS200 | N_Shore | TRUE | I | 6 |
| 1250 | cg11485152 | TRNT1 | Body | S_Shelf | NA | II | 3 |
| 1251 | cg11485595 | NPR3 | Body | Island | NA | II | 5 |
| 1252 | cg11497372 | | | | NA | I | 6 |
| 1253 | cg11503104 | C1orf86; LOC1001280 | Body; TSS200; Bod | N_Shore | NA | II | 1 |
| | | 03; C1orf86 | y | | | | |
| 1254 | cg11504718 | ATP11A; ATP11A | 3′UTR; 3′UTR | S_Shore | NA | II | 13 |
| 1255 | cg11521404 | GJA3 | TSS1500 | Island | NA | I | 13 |
| 1256 | cg11521965 | PTN | TSS200 | | NA | II | 7 |
| 1257 | cg11525280 | C2orf39 | TSS200 | Island | TRUE | I | 2 |
| 1258 | cg11550547 | KCTD14 | TSS200 | | NA | II | 11 |
| 1259 | cg11564981 | NRN1 | TSS200 | Island | TRUE | I | 6 |
| 1260 | cg11567288 | | | | NA | II | 6 |
| 1261 | cg11574975 | ADORA3 | Body | Island | TRUE | I | 1 |
| 1262 | cg11580212 | | | | TRUE | II | 5 |
| 1263 | cg11580948 | FGF5; FGF5 | Body; Body | S_Shore | NA | II | 4 |
| 1264 | cg11593123 | PCDH11X | 5′UTR | Island | NA | II | X |
| 1265 | cg11595135 | | | Island | NA | II | X |
| 1266 | cg11601252 | LBXCOR1 | Body | Island | NA | I | 15 |
| 1267 | cg11605903 | | | S_Shelf | NA | II | 6 |
| 1268 | cg11616651 | AMH | Body | Island | NA | I | 19 |
| 1269 | cg11640591 | PTH1R | Body | Island | NA | II | 3 |
| 1270 | cg11641791 | KRT222 | TSS200 | | NA | I | 17 |
| 1271 | cg11642106 | | | S_Shore | TRUE | I | 3 |
| 1272 | cg11645465 | | | | NA | II | 8 |
| 1273 | cg11648594 | MMP23A; MMP23B | TSS1500; TSS1500 | Island | TRUE | I | 1 |
| 1274 | cg11671688 | GPR6 | 1stExon | Island | NA | I | 6 |
| 1275 | cg11678027 | C13orf38; C13orf38; C1 | TSS200; TSS200; T | Island | NA | I | 13 |
| | | 3orf38; C13orf38; C13o | SS200; TSS200; TS | | | | |
| | | r138; C13orf38 | S200; TSS200 | | | | |
| 1276 | cg11680055 | GSTM1; GSTM1 | TSS200; TSS200 | Island | NA | I | 1 |
| 1277 | cg11684647 | LRRK2 | TSS1500 | Island | NA | II | 12 |
| 1278 | cg11687036 | | | Island | TRUE | II | 3 |
| 1279 | cg11690724 | EBF1 | Body | N_Shelf | NA | II | 5 |
| 1280 | cg11690979 | C1orf230 | Body | S_Shore | NA | II | 1 |
| 1281 | cg11708358 | LRP11 | Body | N_Shore | NA | II | 6 |
| 1282 | cg11712990 | LOC645323; LOC6453 | Body; Body; Body | N_Shore | NA | I | 5 |
| | | 23; LOC645323 | | | | | |
| 1283 | cg11720950 | | | | TRUE | II | 6 |
| 1284 | cg11731890 | HIST1H3G; HIST1H2 | TSS1500; TSS1500 | N_Shore | NA | II | 6 |
| | | BI | | | | | |
| 1285 | cg11735997 | KCNA4 | TSS1500 | Island | NA | II | 11 |
| 1286 | cg11737164 | VGLL3 | Body | N_Shore | NA | II | 3 |
| 1287 | cg11739675 | CHST11 | Body | Island | NA | I | 12 |
| 1288 | cg11748187 | TCF7L2; TCF7L2; TCF | Body; Body; Body; | S_Shore | NA | II | 10 |
| | | 7L2; TCF7L2; TCF7L2; | Body; Body; Body | | | | |
| | | TCF7L2 | | | | | |
| 1289 | cg11756095 | | | Island | TRUE | I | 1 |
| 1290 | cg11791751 | PDPN; PDPN | TSS200; TSS200 | Island | NA | II | 1 |
| 1291 | cg11805669 | | | S_Shore | NA | I | 2 |
| 1292 | cg11811513 | ZNF804A | TSS1500 | N_Shore | NA | II | 2 |
| 1293 | cg11832210 | SLC16A12 | TSS200 | Island | TRUE | I | 10 |
| 1294 | cg11833001 | | | Island | NA | II | 3 |
| 1295 | cg11840125 | EFS; EFS | TSS200; TSS200 | Island | NA | I | 14 |
| 1296 | cg11856078 | | | S_Shore | NA | I | 2 |
| 1297 | cg11856897 | | | Island | TRUE | I | 1 |
| 1298 | cg11857704 | | | Island | NA | I | 2 |
| 1299 | cg11859529 | SLC7A3; SLC7A3; SL | 1stExon; 5′UTR; 1st | Island | NA | I | X |
| | | C7A3; SLC7A3 | Exon; 5′UTR | | | | |
| 1300 | cg11861562 | TAGLN; TAGLN | TSS1500; TSS1500 | | NA | I | 11 |
| 1301 | cg11874123 | PTN; PTN | 5′UTR; 1stExon | | NA | II | 7 |
| 1302 | cg11889692 | | | Island | TRUE | I | 14 |
| 1303 | cg11891925 | | | | NA | II | 10 |
| 1304 | cg11898009 | | | Island | TRUE | I | 7 |
| 1305 | cg11898486 | LYPD5; LYPD5 | 5′UTR; 1stExon | Island | NA | I | 19 |
| 1306 | cg11900861 | FLJ22536 | TSS200 | Island | NA | II | 6 |
| 1307 | cg11901043 | | | Island | NA | I | 12 |
| 1308 | cg11935153 | | | Island | TRUE | II | 6 |
| 1309 | cg11947981 | ITGA4 | Body | Island | NA | II | 2 |
| 1310 | cg11953383 | ME3; ME3; ME3 | 5′UTR; TSS200; 5′U | Island | NA | I | 11 |
| | | | TR | | | | |
| 1311 | cg11973479 | | | Island | NA | II | 7 |
| 1312 | cg11980129 | ROBO1 | 5′UTR | Island | NA | II | 3 |
| 1313 | cg11982736 | CRIP3 | TSS200 | Island | TRUE | I | 6 |
| 1314 | cg12005098 | SLC16A12 | TSS200 | Island | TRUE | I | 10 |
| 1315 | cg12011198 | HDAC4 | 3′UTR | Island | NA | I | 2 |
| 1316 | cg12014547 | NELL1; NELL1 | Body; Body | S_Shore | NA | I | 11 |
| 1317 | cg12016746 | LRP5 | Body | S_Shelf | NA | II | 11 |
| 1318 | cg12019614 | DOCK6 | Body | Island | TRUE | I | 19 |
| 1319 | cg12029804 | KRT222; KRT222 | 5′UTR; 1stExon | | NA | II | 17 |
| 1320 | cg12030550 | ME3; ME3; ME3 | TSS1500; TSS200; | S_Shore | NA | II | 11 |
| | | | TSS1500 | | | | |
| 1321 | cg12094871 | ATXN3; ATXN3; ATX | Body; 3′UTR; Body; | | TRUE | II | 14 |
| | | N3; ATXN3; ATXN3; A | Body; Body; 3′UTR; | | | | |
| | | TXN3; ATXN3; ATXN | Body; Body; 3′UTR; | | | | |
| | | 3; ATXN3; ATXN3; AT | Body; 3′UTR; 3′UT | | | | |
| | | XN3; ATXN3; ATXN3; | R; Body; Body; 3′UT | | | | |
| | | ATXN3; ATXN3; ATX | R; Body; Body; B0d | | | | |
| | | N3; ATXN3; ATXN3; A | y; 3′UTR; Body; 3′U | | | | |
| | | TXN3; ATXN3; ATXN | TR; 3′UTR; Body; B | | | | |
| | | 3; ATXN3; ATXN3; AT | ody; Body; 3′UTR; 3′ | | | | |
| | | XN3; ATXN3; ATXN3; | UTR; 3 ′UTR; Body; | | | | |
| | | ATXN3; ATXN3; ATX | Body; Body; 3′UTR | | | | |
| | | N3; ATXN3; ATXN3; A | | | | | |
| | | TXN3 | | | | | |
| 1322 | cg12052765 | SLC18A3; CHAT | TSS1500; TSS200 | N_Shore | NA | II | 10 |
| 1323 | cg12090430 | ADARB2 | Body | | NA | II | 10 |
| 1324 | cg12093519 | | | N_Shore | TRUE | II | 7 |
| 1325 | cg12103152 | HTR1B | TSS200 | Island | NA | II | 6 |
| 1326 | cg12106728 | | | Island | NA | I | 12 |
| 1298 | cg11857704 | | | Island | NA | I | 2 |
| 1299 | cg11859529 | SLC7A3; SLC7A3; SL | 1stExon; 5′UTR; 1st | | | | |
| | | C7A3; SLC7A3 | Exon; 5′UTR | Island | NA | I | X |
| 1300 | cg11861562 | TAGLN; TAGLN | TSS1500; TSS1500 | | NA | I | 11 |
| 1301 | cg11874123 | PTN; PTN | 5′UTR; 1stExon | | NA | II | 7 |
| 1302 | cg11889692 | | | Island | TRUE | I | 14 |
| 1303 | cg11891925 | | | | NA | II | 10 |
| 1304 | cg11898009 | | | Island | TRUE | I | 7 |
| 1305 | cg11898486 | LYPD5; LYPD5 | 5′UTR; 1stExon | Island | NA | I | 19 |
| 1306 | cg11900861 | FLJ22536 | TSS200 | Island | NA | II | 6 |
| 1307 | cg11901043 | | | Island | NA | I | 12 |
| 1308 | cg11935153 | | | Island | TRUE | II | 6 |
| 1309 | cg11947981 | ITGA4 | Body | Island | NA | II | 2 |
| 1310 | cg11953383 | ME3; ME3; ME3 | 5′UTR; TSS200; 5′U | Island | NA | I | 11 |
| | | | TR | | | | |
| 1311 | cg11973479 | | | Island | NA | II | 7 |
| 1312 | cg11980129 | ROB01 | 5′UTR | Island | NA | II | 3 |
| 1313 | cg11982736 | CR1P3 | TSS200 | Island | TRUE | I | 6 |
| 1314 | cg12005098 | SLC16A12 | TSS200 | Island | TRUE | I | 10 |
| 1315 | cg12011198 | HIDAC4 | 3′UTR | Island | NA | I | 2 |
| 1316 | cg12014547 | NELL1; NELL1 | Body; Body | S_Shore | NA | I | 11 |
| 1317 | cg12016746 | LRP5 | Body | S_Shelf | NA | II | 11 |
| 1318 | cg12019614 | DOCK6 | Body | Island | TRUE | I | 19 |
| 1319 | cg12029804 | KRT222; KRT222 | 5′UTR; 1stExon | | NA | II | 17 |
| 1320 | cg12030550 | ME3; ME3; ME3 | TSS1500; TSS200; | S_Shore | NA | II | 11 |
| | | | TSS1500 | | | | |
| 1321 | cg12034871 | ATXN3; ATXN3; ATX | Body; 3′UTR; Body; | | TRUE | II | 14 |
| | | N3; ATXN3; ATXN3; A | Body; Body; 3′UTR; | | | | |
| | | TXN3; ATXN3; ATXN | Body; Body; 3′UTR; | | | | |
| | | 3; ATXN3; ATXN3; AT | Body; 3′UTR; 3′UT | | | | |
| | | XN3; ATXN3; ATXN3; | R; Body; Body; 3′UT | | | | |
| | | ATXN3; ATXN3; ATX | R; Body; Body; Bod | | | | |
| | | N3; ATXN3; ATXN3; A | y; 3′UTR; Body; 3′U | | | | |
| | | TXN3; ATXN3; ATXN | TR; 3′UTR; Body; B | | | | |
| | | 3; ATXN3; ATXN3; AT | ody; Body; 3′UTR; 3′ | | | | |
| | | XN3; ATXN3; ATXN3; | UTR; 3′UTR; Body; | | | | |
| | | ATXN3; ATXN3; ATX | Body; Body; 3′UTR | | | | |
| | | N3; ATXN3; ATXN3; A | | | | | |
| | | TXN3 | | | | | |
| 1322 | cg12052765 | SLC18A3; CHAT | TSS1500; TSS200 | N_Shore | NA | II | 10 |
| 1323 | cg12090430 | ADARB2 | Body | | NA | II | 10 |
| 1324 | cg12093519 | | | N_Shore | TRUE | II | 7 |
| 1325 | cg12103152 | HTR1B | TSS200 | Island | NA | II | 6 |
| 1326 | cg12106728 | | | Island | NA | I | 12 |
| 1298 | cg11857704 | | | Island | NA | I | 2 |
| 1299 | cg11859529 | SLC7A3; SLC7A3; SL | 1stExon; 5′UTR; 1st | Island | NA | I | X |
| | | C7A3; SLC7A3 | Exon; 5′UTR | | | | |
| 1300 | cg11861562 | TAGLN; TAGLN | TSS1500; TSS1500 | | NA | I | 11 |
| 1301 | cg11874123 | PTN; PTN | 5′UTR; 1stExon | | NA | II | 7 |
| 1302 | cg11889692 | | | Island | TRUE | I | 14 |
| 1303 | cg11891925 | | | | NA | II | 10 |
| 1304 | cg11898009 | | | Island | TRUE | I | 7 |
| 1305 | cg11898486 | LYPD5; LYPD5 | 5′UTR; 1stExon | Island | NA | I | 19 |
| 1306 | cg11900861 | FLJ22536 | TSS200 | Island | NA | II | 6 |
| 1307 | cg11901043 | | | Island | NA | I | 12 |
| 1308 | cg11935153 | | | Island | TRUE | II | 6 |
| 1309 | cg11947981 | ITGA4 | Body | Island | NA | II | 2 |
| 1310 | cg11953383 | ME3; ME3; ME3 | 5′UTR; TSS200; 5′UTR | Island | NA | I | 11 |
| 1311 | cg11973479 | | | Island | NA | II | 7 |
| 1312 | cg11980129 | ROBO1 | 5′UTR | Island | NA | II | 3 |
| 1313 | cg11982736 | CRIP3 | TSS200 | Island | TRUE | I | 6 |
| 1314 | cg12005098 | SLC16A12 | TSS200 | Island | TRUE | I | 10 |
| 1315 | cg12011198 | HDAC4 | 3′UTR | Island | NA | | 2 |
| 1316 | cg12014547 | NELL1; NELL1 | Body; Body | S_Shore | NA | I | 11 |
| 1317 | cg12016746 | LRP5 | Body | S_Shelf | NA | II | 11 |
| 1318 | cg12019614 | DOCK6 | Body | Island | TRUE | I | 19 |
| 1319 | cg12029804 | KRT222; KRT222 | 5′UTR; 1stExon | | NA | II | 17 |
| 1320 | cg12030550 | ME3; ME3KAE3 | TSS1500; TSS200; | S_Shore | NA | II | 11 |
| | | | TSS1500 | | | | |
| 1321 | cg12034871 | ATXN3; ATXN3; ATX | Body; 3′UTR; Body; | | TRUE | II | 14 |
| | | N3; ATXN3; ATXN3; A | Body; Body; 3′UTR; | | | | |
| | | TXN3; ATXN3; ATXN | Body; Body; 3′UTR; | | | | |
| | | 3; ATXN3; ATXN3; AT | Body; 3′UTR; 3′UT | | | | |
| | | XN3; ATXN3; ATXN3; | R; Body; Body; 3′UT | | | | |
| | | ATXN3; ATXN3; ATX | R; Body; Body; Bod | | | | |
| | | N3; ATXN3; ATXN3; A | y; 3′UTR; Body; 3′U | | | | |
| | | TXN3; ATXN3; ATXN | TR; 3′UTR; Body; B | | | | |
| | | 3; ATXN3; ATXN3; AT | ody; Body; 3′UTR; 3′ | | | | |
| | | XN3; ATXN3; ATXN3; | UTR; 3′UTR; Body; | | | | |
| | | ATXN3; ATXN3; ATX | Body; Body; 3′UTR | | | | |
| | | N3; ATXN3; ATXN3; A | | | | | |
| | | TXN3 | | | | | |
| 1322 | cg12052765 | SLC18A3; CHAT | TSS1500; TSS200 | N_Shore | NA | II | 10 |
| 1323 | cg12090430 | ADARB2 | Body | | NA | II | 10 |
| 1324 | cg12093519 | | | N_Shore | TRUE | II | 7 |
| 1325 | cg12103152 | HTR1B | TSS200 | Island | NA | II | 6 |
| 1326 | cg12106728 | | | Island | NA | I | 12 |
| 1298 | cg11857704 | | | Island | NA | I | 2 |
| 1299 | cg11859529 | SLC7A3; 5LC7A3; SL | 1stExon; 5′UTR; 1st | Island | NA | I | X |
| | | C7A3; SLC7A3 | Exon; 5′UTR | | | | |
| 1300 | cg11861562 | TAGLN; TAGLN | TSS1500; TSS1500 | | NA | I | 11 |
| 1301 | cg11874123 | PTN; PTN | 5 ′UTR; 1stExon | | NA | II | 7 |
| 1302 | cg11889692 | | | Island | TRUE | I | 14 |
| 1303 | cg11891925 | | | | NA | II | 10 |
| 1304 | cg11898009 | | | Island | TRUE | I | 7 |
| 1305 | cg11898486 | LYPD5; LYPD5 | 5′UTR; 1stExon | Island | NA | I | 19 |
| 1306 | cg11900861 | FLJ22536 | TSS200 | Island | NA | II | 6 |
| 1307 | cg11901043 | | | Island | NA | I | 12 |
| 1308 | cg11935153 | | | Island | TRUE | II | 6 |
| 1309 | cg11947981 | ITGA4 | Body | Island | NA | II | 2 |
| 1310 | cg11953383 | ME3; ME3; ME3 | 5′UTR; TSS200; 5′U | Island | NA | I | 11 |
| | | | TR | | | | |
| 1311 | cg11973479 | | | Island | NA | II | 7 |
| 1312 | cg11980129 | ROBO1 | 5′UTR | Island | NA | II | 3 |
| 1313 | cg11982736 | CRIP3 | TSS200 | Island | TRUE | I | 6 |
| 1314 | cg12005098 | SLC16A12 | TSS200 | Island | TRUE | I | 10 |
| 1315 | cg12011198 | HDAC4 | 3′UTR | Island | NA | I | 2 |
| 1316 | cg12014547 | NELL1; NELL1 | Body; Body | S_Shore | NA | I | 11 |
| 1317 | cg12016746 | LRP5 | Body | S_Shelf | NA | II | 11 |
| 1318 | cg12019614 | DOCK6 | Body | Island | TRUE | I | 19 |
| 1319 | cg12029804 | KRT222; KRT222 | 5′UTR; 1stExon | | NA | II | 17 |
| | | | TSS1500 | | | | |
| TSS1 | S_Shore | NA | II | 11 | 86383713 | GGGGATTT | |
| 500 | | | | | | GCGTTTGG | |
| | | | | | | GGGTCAGC | |
| | | | | | | ATATCCTC | |
| | | | | | | GCACTCTC | |
| | | | | | | CCAACATT | |
| | | | | | | CG | |
| 1321 | cg12034871 | ATXN3; ATXN3; ATX | Body; 3′UTR; Body; | | TRUE | II | 14 |
| | | N3; ATXN3; ATXN3; A | Body; Body; 3′UTR; | | | | |
| | | TXN3; ATXN3; ATXN | Body; Body; 3′UTR; | | | | |
| | | 3; ATXN3; ATXN3; AT | Body; 3′UTR; 3′UT | | | | |
| | | XN3; ATXN3; ATXN3; | R; Body; Body; 3′UT | | | | |
| | | ATXN3; ATXN3; ATX | R; Body; Body; Bod | | | | |
| | | N3; ATXN3; ATXN3; A | y; 3′UTR; Body; 3′U | | | | |
| | | TXN3; ATXN3; ATXN | TR; 3′UTR; Body; B | | | | |
| | | 3; ATXN3; ATXN3; AT | ody; Body; 3′UTR; 3′ | | | | |
| | | XN3; ATXN3; ATXN3; | UTR; 3′UTR; Body; | | | | |
| | | ATXN3; ATXN3; ATX | Body; Body; 3′UTR | | | | |
| | | N3; ATXN3; ATXN3; A | | | | | |
| | | TXN3 | | | | | |
| 1322 | cg12052765 | SLC18A3; CHAT | TSS1500; TSS200 | N_Shore | NA | II | 10 |
| 1323 | cg12090430 | ADARB2 | Body | | NA | II | 10 |
| 1324 | cg12093519 | | | N_Shore | TRUE | II | 7 |
| 1325 | cg12103152 | HTR1B | TSS200 | Island | NA | II | 6 |
| 1326 | cg12106728 | | | Island | NA | I | 12 |
| 1298 | cg11857704 | | | Island | NA | I | 2 |
| 1299 | cg11859529 | SLC7A3; SLC7A3; SL | 1stExon; 5′UTR; 1st | Island | NA | I | X |
| | | C7A3; SLC7A3 | Exon; 5′UTR | | | | |
| 1300 | cg11861562 | TAGLN; TAGLN | TSS1500; TSS1500 | | NA | I | 11 |
| 1301 | cg11874123 | PTN PTN | 5′UTR; 1stExon | | NA | II | 7 |
| 1302 | cg11889692 | | | Island | TRUE | I | 14 |
| 1303 | cg11891925 | | | | NA | II | 10 |
| 1304 | cg11898009 | | | Island | TRUE | I | 7 |
| 1305 | cg11898486 | LYPD5; LYPD5 | 5′UTR; 1stExon | Island | NA | I | 19 |
| 1306 | cg11900861 | FLJ22536 | TSS200 | Island | NA | II | 6 |
| 1307 | cg11901043 | | | Island | NA | I | 12 |
| 1308 | cg11935153 | | | Island | TRUE | II | 6 |
| 1309 | cg11947981 | ITGA4 | Body | Island | NA | II | 2 |
| 1310 | cg11953383 | ME3; ME3; ME3 | 5′UTR; TSS200; 5′U | Island | NA | I | 11 |
| | | | TR | | | | |
| 1311 | cg11973479 | | | Island | NA | II | 7 |
| 1312 | cg11980129 | ROBO1 | 5′UTR | Island | NA | II | 3 |
| 1313 | cg11982736 | CRIP3 | TSS200 | Island | TRUE | I | 6 |
| 1314 | cg12005098 | SLC16A12 | TSS200 | Island | TRUE | I | 10 |
| 1315 | cg12011198 | HDAC4 | 3′UTR | Island | NA | I | 2 |
| 1316 | cg12014547 | NELL1; NELL1 | Body; Body | S_Shore | NA | I | 11 |
| 1317 | cg12016746 | LRP5 | Body | S_Shelf | NA | II | 11 |
| 1318 | cg12019614 | DOCK6 | Body | Island | TRUE | I | 19 |
| 1319 | cg12029804 | KRT222; KRT222 | 5′UTR; 1stExon | | NA | II | 17 |
| 1320 | cg12030550 | ME3; ME3; ME3 | TSS1500; TSS200; | S_Shore | NA | II | 11 |
| | | | TSS1500 | | | | |
| 1321 | cg12034871 | ATXN3; ATXN3; ATX | Body; 3′UTR; Body; | | TRUE | II | 14 |
| | | N3; ATXN3; ATXN3; A | Body; Body; 3′UTR; | | | | |
| | | TXN3; ATXN3; ATXN | Body; Body; 3′UTR; | | | | |
| | | 3; ATXN3; ATXN3; AT | Body; 3′UTR; 3′UT | | | | |
| | | XN3; ATXN3; ATXN3; | R; Body; Body; 3′UT | | | | |
| | | ATXN3; ATXN3; ATX | R; Body; Body; Bod | | | | |
| | | N3; ATXN3; ATXN3; A | y; 3′UTR; Body; 3′U | | | | |
| | | TXN3; ATXN3; ATXN | TR; 3′UTR; Body; B | | | | |
| | | 3; ATXN3; ATXN3; AT | ody; Body; 3′UTR; 3′ | | | | |
| | | XN3; ATXN3; ATXN3; | UTR; 3′UTR; Body; | | | | |
| | | ATXN3; ATXN3; ATX | Body; Body; 3′UTR | | | | |
| | | N3; ATXN3; ATXN3; A | | | | | |
| | | TXN3 | | | | | |
| 1322 | cg12052765 | SLC18A3; CHAT | TSS1500; TSS200 | N_Shore | NA | II | 10 |
| 1323 | cg12090430 | ADARB2 | Body | | NA | II | 10 |
| 1324 | cg12093519 | | | N_Shore | TRUE | II | 7 |
| 1325 | cg12103152 | HTR1B | TSS200 | Island | NA | II | 6 |
| 1326 | cg12106728 | | | Island | NA | I | 12 |
| 1327 | cg12113984 | | | Island | TRUE | II | 12 |
| 1328 | cg12116395 | ATP6AP2 | Body | S_Shore | NA | I | X |
| 1329 | cg12126857 | | | | TRUE | I | 1 |
| 1330 | cg12135344 | CHD5 | Body | Island | TRUE | I | 1 |
| 1331 | cg12164612 | KCNA4 | 5′UTR | Island | NA | I | 11 |
| 1332 | cg12166610 | NRG1 | Body | Island | NA | I | 8 |
| 1333 | cg12169365 | RIN3 | TSS1500 | N_Shore | NA | I | 14 |
| 1334 | cg12170314 | INSC; INSC; INSC | Body; 5′UTR; 1stEx | Island | NA | I | 11 |
| | | | on | | | | |
| 1335 | cg12173409 | | | Island | NA | II | 3 |
| 1336 | cg12177793 | NFATC4; NFATC4 | Body; Body | Island | NA | I | 14 |
| 1337 | cg12193731 | ACVRL1 | TSS1500 | Island | NA | I | 12 |
| 1338 | cg12196692 | HEATR7B2; HEATR7 | 1stExon; 5′UTR | | NA | II | 5 |
| | | B2 | | | | | |
| 1339 | cg12217600 | | | | NA | I | 10 |
| 1340 | cg12254845 | | | Island | TRUE | II | 15 |
| 1341 | cg12268236 | PRDM16; PRDM16 | Body; Body | Island | NA | I | 1 |
| 1342 | cg12287936 | NDUFS6; MRPL36 | TSS1500; TSS1500 | Island | NA | II | 5 |
| 1343 | cg12295100 | GPRASP1; GPRASP1; | 5′UTR; 5′UTR; 5′UT | Island | NA | I | X |
| | | GPRASP1 | R | | | | |
| 1344 | cg12302982 | | | Island | NA | I | 2 |
| 1345 | cg12311175 | NDST3 | Body | | NA | II | 4 |
| 1346 | cg12323723 | | | Island | NA | I | X |
| 1347 | cg12337525 | | | N_Shelf | NA | II | 4 |
| 1348 | cg12341047 | FGF5; FGF5 | Body; Body | S_Shore | NA | II | 4 |
| 1349 | cg12347429 | FLJ22536 | Body | Island | NA | I | 6 |
| 1350 | cg12367389 | HTR2A; HTR2A | Body; Body | | TRUE | I | 13 |
| 1351 | cg12368188 | | | Island | NA | I | 15 |
| 1352 | cg12396306 | PCDHB14 | TSS1500 | N_Shore | NA | I | 5 |
| 1353 | cg12403253 | ABT1 | Body | N_Shore | NA | II | 6 |
| 1354 | cg12421282 | NFYC; NFYC; LOC100 | 5′UTR; 5′UTR; TSS | S_Shore | NA | II | 1 |
| | | 130557; NFYC; NFYC; | 1500; 5′UTR; 5′UTR | | | | |
| | | NFYC | ; 5′UTR | | | | |
| 1355 | cg12444328 | LHX9; LHX9 | Body; Body | S_Shore | NA | II | 1 |
| 1356 | cg12452298 | | | N_Shore | TRUE | I | 15 |
| 1357 | cg12463578 | ZFP57 | 1stExon | | NA | I | 6 |
| 1358 | cg12467264 | | | N_Shore | TRUE | I | 5 |
| 1359 | cg12473912 | | | Island | NA | I | 3 |
| 1360 | cg12489727 | TNRC6C; TNRC6C | 3′UTR; 3′UTR | S_Shore | NA | II | 17 |
| 1361 | cg12499092 | NFYB | 3′UTR | | NA | II | 12 |
| 1362 | cg12499235 | ASCL2 | TSS1500 | S_Shore | NA | I | 11 |
| 1363 | cg12506775 | C10orf18 | 5′UTR | | TRUE | II | 10 |
| 1364 | cg12513880 | | | Island | NA | I | 12 |
| 1365 | cg12534150 | APC; APC; APC; APC; | 1stExon; 5′UTR; 1st | | TRUE | I | 5 |
| | | APC | Exon; 5′UTR; 5′UT | | | | |
| | | | R | | | | |
| 1366 | cg12563839 | C14orf159; C14orf159; | 1stExon; 1stExon; 5′ | | NA | II | 14 |
| | | C14orf159 C14orf159; | UTR; 1stExon; 5′UT | | | | |
| | | C14orf159; C14orf159; | R; 5′UTR; TSS1500; | | | | |
| | | C14orf159; C14orf159; | 1stExon; 5′UTR | | | | |
| | | C14orf159 | | | | | |
| 1367 | cg12584111 | MOXD2 | Body | | NA | I | 7 |
| 1368 | cg12584785 | CHRNA7 | Body | S_Shelf | NA | II | 15 |
| 1369 | cg12598089 | KCNAB1; KCNAB1; K | TSS200; Body; Bod | N_Shore | TRUE | II | 3 |
| | | CNAB1 | y | | | | |
| 1370 | cg12610744 | KRT4 | TSS1500 | | NA | II | 12 |
| 1371 | cg12610917 | IRF2BP1 | 1stExon | Island | TRUE | II | 19 |
| 1372 | cg12620035 | | | S_Shore | NA | I | 7 |
| 1373 | cg12634080 | | | Island | NA | I | 13 |
| 1374 | cg12642693 | SHROOM4; SHROOM | 1stExon; Body | Island | NA | II | X |
| | | 4 | | | | | |
| 1375 | cg12698813 | | | Island | NA | II | 12 |
| 1376 | cg12727795 | PDGFRB | TSS1500 | | NA | II | 5 |
| 1377 | cg12728791 | HMCN1 | Body | | NA | II | 1 |
| 1378 | cg12741994 | CLDN11 | Body | Island | TRUE | II | 3 |
| 1379 | cg12744758 | | | | NA | I | 13 |
| 1380 | cg12744820 | OLIG3 | 1stExon | Island | TRUE | I | 6 |
| 1381 | cg12754571 | LOC148824; OR2C3 | TSS200; 3′UTR | Island | NA | I | 1 |
| 1382 | cg12768605 | LYPD5 | TSS200 | Island | NA | II | 19 |
| 1383 | cg12784272 | | | | TRUE | II | 17 |
| 1384 | cg12787405 | | | Island | NA | II | 20 |
| 1385 | cg12799885 | | | Island | NA | I | 10 |
| 1386 | cg12814550 | | | S_Shore | NA | I | X |
| 1387 | cg12819011 | C12orf35 | Body | | TRUE | II | 12 |
| 1388 | cg12827262 | TULP1 | Body | Island | NA | II | 6 |
| 1389 | cg12829717 | DDIT4L | 5′UTR | Island | NA | I | 4 |
| 1390 | cg12832313 | PCDHAC2; PCDHAC2 | 1stExon; TSS200; B | Island | NA | I | 5 |
| | | ; PCDHA7; PCDHAl2; | ody; Body; Body; Bo | | | | |
| | | PCDHA6; PCDHA10; P | dy; Body; Body; Bod | | | | |
| | | CDHA4; PCDHA11; P | y; Body; Body; Body | | | | |
| | | CDHA8; PCDHA6; PC | ; Body; Body; Body; | | | | |
| | | DHA1; PCDHA2; PCD | Body; Body; Body; 5 | | | | |
| | | HA1; PCDHA9; PCDH | ′UTR; Body | | | | |
| | | A 13; PCDHA5; PCDH | | | | | |
| | | AC1; PCDHA3; PCDH | | | | | |
| | | AC2; PCDHA10 | | | | | |
| 1391 | cg12833465 | SFTA3 | Body | Island | TRUE | II | 14 |
| 1392 | cg12836959 | | | | NA | I | 3 |
| 1393 | cg12847554 | SIM1 | Body | Island | NA | II | 6 |
| 1394 | cg12850379 | TCEA1; TCEA1 | TSS1500; TSS1500 | S_Shore | NA | I | 8 |
| 1395 | cg12857541 | DHX15 | Body | N_Shelf | NA | II | 4 |
| 1396 | cg12876356 | GFI1; GFI1; GFI1 | Body; Body; Body | Island | TRUE | II | 1 |
| 1398 | cg12883279 | PPT2; PRRT1; PPT2 | TSS1500; TSS1500 | N_Shore | TRUE | I | 6 |
| | | | ; TSS1500 | | | | |
| 1399 | cg12898512 | TSTD1; TSTD1; TSTD | Body; 3′UTR; Body | N_Shore | NA | II | 1 |
| | | 1 | | | | | |
| 1400 | cg12922751 | | | N_Shore | TRUE | II | 14 |
| 1401 | cg12938068 | | | N_Shore | NA | I | 13 |
| 1402 | cg12940439 | | | Island | NA | II | 1 |
| 1403 | cg12950441 | HTR2C | TSS200 | Island | TRUE | I | X |
| 1404 | cg12979234 | DBNL; DBNL; DBNL | TSS1500; TSS1500 | N_Shore | NA | II | 7 |
| | | | ; TSS1500 | | | | |
| 1405 | cg13000082 | AOX1 | TSS1500 | Island | TRUE | II | 2 |
| 1406 | cg13004182 | | | Island | TRUE | I | 5 |
| 1407 | cg13012115 | OR8B2 | TSS1500 | | NA | II | 11 |
| 1408 | cg13033070 | | | Island | NA | I | 5 |
| 1409 | cg13038560 | C2orf60; C2orf60; C2or | Body; Body; TSS15 | N_Shore | NA | II | 2 |
| | | f47 | 00 | | | | |
| 1410 | cg13046832 | C14orf23 | Body | Island | NA | I | 14 |
| 1411 | cg13060157 | | | Island | TRUE | I | 1 |
| 1412 | cg13062913 | NCAM2 | TSS1500 | Island | NA | II | 21 |
| 1413 | cg13097407 | CRIP3 | TSS200 | Island | TRUE | II | 6 |
| 1414 | cg13101087 | GALNT13 | 5′UTR | Island | NA | I | 2 |
| 1415 | cg13121699 | ZNF804A | TSS1500 | N_Shore | NA | II | 2 |
| 1416 | cg13164157 | PROM1; PROM1 | 5′UTR; 5′UTR | Island | TRUE | II | 4 |
| 1417 | cg13170005 | VMO1; VMO1; VMO1; | TSS1500; TSS1500 | N_Shore | NA | II | 17 |
| | | VMO1 | ; TSS1500; TSS150 | | | | |
| | | | 0 | | | | |
| 1418 | cg13174253 | C8orf33 | Body | S_Shore | NA | II | 8 |
| 1419 | cg13180315 | | | N_Shore | NA | I | 2 |
| 1420 | cg13181164 | MEIS2; MEIS2; MEIS2 | Body; Body; Body; | N_Shore | NA | II | 15 |
| | | ;MEIS2; MEIS2; MEIS | Body; Body Body; | | | | |
| | | 2; MEIS2 | Body | | | | |
| 1421 | cg13200838 | | | S_Shore | TRUE | II | 1 |
| 1422 | cg13207797 | EPO | TSS200 | Island | TRUE | I | 7 |
| 1423 | cg13208922 | | | Island | NA | I | 4 |
| 1424 | cg13211683 | GDF6 | Body | Island | NA | I | 8 |
| 1425 | cg13213923 | MARCH10; MARCH1 | 5′UTR; TSS1500; 1s | Island | NA | I | 17 |
| | | 0; MARCH10 | tExon | | | | |
| 1426 | cg13217661 | | | Island | NA | I | X |
| 1427 | cg13223227 | MAOB | Body | Island | NA | II | X |
| 1428 | cg13266435 | ANKRD3OB | TSS200 | Island | NA | I | 18 |
| 1429 | cg13281171 | SYCP2L | TSS200 | N_Shore | NA | II | 6 |
| 1430 | cg13294846 | | | Island | NA | II | 5 |
| 1431 | cg13295238 | EBF1 | Body | Island | TRUE | II | 5 |
| 1432 | cg13300273 | GPR25 | 1stExon | Island | TRUE | I | 1 |
| 1433 | cg13300630 | ROBO1; ROBO1; ROB | Body; Body; Body; | | TRUE | II | 3 |
| | | O1; ROBO1 | Body | | | | |
| 1434 | cg13340126 | SLC9A3 | Body | Island | NA | I | 5 |
| 1435 | cg13355574 | | | Island | NA | I | 10 |
| 1436 | cg13388277 | ZNF727 | TSS1500 | N_Shore | NA | II | 7 |
| 1437 | cg13406145 | | | N_Shore | TRUE | II | 15 |
| 1438 | cg13409070 | PTPRN2; PTPRN2; PT | Body; Body; Body | S_Shelf | NA | I | 7 |
| | | PRN2 | | | | | |
| 1439 | cg13421439 | ANKRD29 | Body | Island | NA | I | 18 |
| 1440 | cg13434638 | ITGA11 | Body | Island | NA | I | 15 |
| 1441 | cg13443950 | | | | TRUE | II | 4 |
| 1442 | cg13449257 | | | N_Shore | NA | I | 9 |
| 1443 | cg13450196 | | | | TRUE | II | 2 |
| 1444 | cg13469595 | | | Island | TRUE | II | 1 |
| 1445 | cg13486406 | | | Island | NA | II | 7 |
| 1446 | cg13492245 | FPGS; FPGS | Body; 5′UTR | S_Shore | NA | I | 9 |
| 1447 | cg13492364 | FMN2 | Body | S_Shore | NA | II | 1 |
| 1448 | cg13501793 | | | N_Shore | NA | II | 14 |
| 1449 | cg13507224 | OR10J3 | 1stExon | | NA | II | 1 |
| 1450 | cg13525088 | | | S_Shore | TRUE | I | 9 |
| 1451 | cg13539545 | | | Island | TRUE | I | 14 |
| 1452 | cg13552831 | TRPM5 | Body | Island | NA | II | 11 |
| 1453 | cg13564460 | | | S_Shelf | NA | II | 6 |
| 1454 | cg13564742 | FOXE1 | TSS1500 | N_Shore | NA | II | 9 |
| 1455 | cg13567349 | B3GAT1; B3GAT1 | Body; Body | S_Shore | NA | II | 11 |
| 1456 | cg13568106 | | | | TRUE | I | 17 |
| 1457 | cg13582793 | NLGNI | 5′UTR | | NA | II | 3 |
| 1458 | cg13594869 | FLRT2 | Body | | NA | II | 14 |
| 1459 | cg13611347 | NOL4 | Body | Island | TRUE | I | 18 |
| 1460 | cg13631572 | ADCY4 | TSS200 | Island | NA | I | 14 |
| 1461 | cg13631916 | FAM162B | TSS200 | Island | NA | II | 6 |
| 1462 | cg13634242 | | | Island | TRUE | I | 5 |
| 1463 | cg13644239 | TRIP13; BRD9; BRD9; | TSS1500; 5′UTR; B | N_Shore | NA | II | 5 |
| | | TRIP13; BRD9 | ody; TSS1500; Body | | | | |
| 1464 | cg13655674 | TBX15 | 5′UTR | Island | NA | II | 1 |
| 1465 | cg13675050 | | | N_Shore | TRUE | I | X |
| 1466 | cg13678973 | ELAVL4 | Body | Island | TRUE | I | 1 |
| 1467 | cg13679303 | | | S_Shore | NA | I | 9 |
| 1468 | cg13718418 | | | N_Shore | NA | I | 12 |
| 1469 | cg13721404 | NOL4 | Body | Island | TRUE | I | 18 |
| 1470 | cg13726724 | | | Island | TRUE | II | X |
| 1471 | cg13748267 | | | S_Shore | NA | II | X |
| 1472 | cg13756380 | | | Island | NA | I | 9 |
| 1473 | cg13758712 | ADAMTS1 | TSS1500 | S_Shore | NA | I | 21 |
| 1474 | cg13799986 | TMEM141 | Body | S_Shore | NA | II | 9 |
| 1475 | cg13800209 | MEIS2; MEIS2; MEIS2 | 1stExon; Body; Bod | Island | NA | I | 15 |
| | | ; MEIS2; MEIS2; MEIS | y; 5′UTR; Body; Bod | | | | |
| | | 2; MEIS2 | y; Body | | | | |
| 1476 | cg13810556 | RPL37A | TSS1500 | N_Shore | NA | I | 2 |
| 1477 | cg13818316 | RIPK4 | Body | N_Shore | NA | II | 21 |
| 1478 | cg13821176 | TRIB1 | Body | S_Shelf | NA | II | 8 |
| 1479 | cg13849454 | | | Island | NA | I | 9 |
| 1480 | cg13871400 | HMSD | TSS200 | | TRUE | I | 18 |
| 1481 | cg13875120 | AOX1; AOX1 | 1stExon; 5′UTR | Island | TRUE | I | 2 |
| 1482 | cg13875536 | BARHL1 | Body | Island | TRUE | I | 9 |
| 1483 | cg13877670 | ONECUT1 | TSS1500 | Island | TRUE | II | 15 |
| 1484 | cg13878677 | IQSEC1 | Body | | TRUE | I | 3 |
| 1485 | cg13886334 | | | N_Shore | NA | II | 2 |
| 1486 | cg13897627 | | | | NA | II | 16 |
| 1487 | cg13899188 | TRIM2; TRIM2 | Body; 5′UTR | Island | NA | I | 4 |
| 1488 | cg13912117 | | | Island | NA | I | 8 |
| 1489 | cg13925692 | CHL1 | 5′UTR | Island | NA | II | 3 |
| 1490 | cg13933262 | PCDHGA4; PCDHGA | Body; Body; Body; | Island | NA | I | 5 |
| | | 9; PCDHGA1; PCDHG | Body; TSS200; Bod | | | | |
| | | B1; CDHGB7; PCDH | y; Body; TSS200; Bo | | | | |
| | | GB6; PCDHGB3; PCD | dy; Body; Body; Bod | | | | |
| | | HGB7; PCDHGA6; PC | y; Body; Body; Body | | | | |
| | | DHGA8; PCDHGA10; | ; Body; Body; Body | | | | |
| | | PCDHGA5; PCDHGB4 | | | | | |
| | | ; PCDHGA3; PCDHGA | | | | | |
| | | 2; PCDHGB2; PCDHG | | | | | |
| | | A7; PCDHGB5 | | | | | |
| 1491 | cg13941830 | | | Island | NA | II | 1 |
| 1492 | cg13944838 | GFPT2 | Body | Island | NA | I | 5 |
| 1493 | cg13974838 | PTCH1; PTCH1; PTCH | Body; Body; Body; | | NA | II | 9 |
| | | 1; PTCH1; PTCH1; PTC | Body; Body Body; | | | | |
| | | H1; PTCH1 | Body | | | | |
| 1494 | cg13990092 | OXGR1 | TSS200 | Island | TRUE | I | 13 |
| 1495 | cg13994408 | MAGEA10; MAGEA1 | TSS1500; TSS1500 | | NA | II | X |
| | | 0 | | | | | |
| 1496 | cg14002960 | NOL4 | Body | Island | TRUE | I | 18 |
| 1497 | cg14015441 | DPYS | TSS200 | Island | NA | I | 8 |
| 1498 | cg14024242 | | | Island | NA | I | 9 |
| 1499 | cg14026459 | ELAVL2; ELAVL2; EL | 5′UTR; 5′UTR; 5′UT | Island | NA | I | 9 |
| | | AVL2 | R | | | | |
| 1500 | cg14030882 | | | | NA | I | 14 |
| 1501 | cg14033514 | | | S_Shore | NA | I | 17 |
| 1502 | cg14052511 | LOC389705 | Body | | NA | II | 9 |
| 1503 | cg14056738 | | | | TRUE | I | 2 |
| 1504 | cg14064694 | HIST1H2BI | 1stExon | Island | NA | II | 6 |
| 1505 | cg14065115 | | | N_Shore | NA | I | 6 |
| 1506 | cg14074052 | | | Island | NA | I | 12 |
| 1507 | cg14089267 | | | Island | NA | I | 13 |
| 1508 | cg14094639 | AURKAIP1; AURKAI | Body; Body; Body | Island | NA | I | 1 |
| | | P1; AURKAIP1 | | | | | |
| 1509 | cg14094983 | NXPH1 | Body | Island | NA | I | 7 |
| 1510 | cg14126020 | C20orf166; C20orf200 | 5′UTR; TSS1500 | N_Shore | NA | I | 20 |
| 1511 | cg14142965 | TXNRD1 | TSS200 | Island | NA | I | 12 |
| 1512 | cg14145801 | ZSWIM2 | 1stExon | N_Shore | TRUE | I | 2 |
| 1513 | cg14151317 | ABCA2; ABCA2 | Body; Body | N_Shore | NA | II | 9 |
| 1514 | cg14164044 | | | N_Shore | TRUE | II | 15 |
| 1515 | cg14179389 | GFI1; GFI1; GFI1 | Body; Body; Body | Island | NA | I | 1 |
| 1516 | cg14189141 | | | Island | NA | I | 9 |
| 1517 | cg14192029 | ZNF718 | Body | S_Shore | NA | II | 4 |
| 1518 | cg14202679 | | | S_Shore | NA | II | 6 |
| 1519 | cg14203525 | GAP43; GAP43 | Body; 5′UTR | Island | NA | I | 3 |
| 1520 | cg14206172 | FBXO17 | TSS1500 | S_Shore | TRUE | I | 19 |
| 1521 | cg14207921 | KLHL33 | Body | | NA | I | 14 |
| 1522 | cg14238325 | CRIP3 | TSS1500 | S_Shore | NA | II | 6 |
| 1523 | cg14247635 | ZAP70; ZAP70 | 3′UTR; 3′UTR | | NA | II | 2 |
| 1524 | cg14248367 | | | | TRUE | I | 9 |
| 1525 | cg14250833 | GCM2 | TSS200 | N_Shore | NA | I | 6 |
| 1526 | cg14254720 | LRRC8C | TSS1500 | N_Shore | NA | II | 1 |
| 1527 | cg14261840 | FEZF2 | TSS1500 | S_Shore | NA | II | 3 |
| 1528 | cg14262681 | | | N_Shore | NA | I | 20 |
| 1529 | cg14273822 | HIST1H3G; HIST1H2 | TSS200; TSS1500 | N_Shore | NA | II | 6 |
| | | B1 | | | | | |
| 1530 | cg14283569 | | | Island | NA | I | 19 |
| 1531 | cg14283758 | | | S_Shore | NA | II | 4 |
| 1532 | cg14299940 | PHYHD1; PHYHD1; P | Body; Body; Body | | NA | I | 9 |
| | | HYHD1 | | | | | |
| 1533 | cg14300812 | MED27 | Body | | TRUE | II | 9 |
| 1534 | cg14323199 | MRC2 | Body | Island | NA | II | 17 |
| 1535 | cg14326671 | LOC100192378 | Body | | TRUE | I | 8 |
| 1536 | cg14343214 | EYA4; EYA4; EYA4 | TSS1500; TSS1500 | N_Shore | NA | I | 6 |
| | | | ; TSS1500 | | | | |
| 1537 | cg14348741 | | | Island | NA | I | 9 |
| 1538 | cg14349667 | FGF5; FGF5 | Body; Body | S_Shore | NA | I | 4 |
| 1539 | cg14362370 | ABL1; ABL1 | 5′UTR; 1stExon | S_Shore | NA | II | 9 |
| 1540 | cg14376548 | CNP | Body | Island | NA | II | 17 |
| 1541 | cg14380270 | SLFN11; SLFN11; SLF | TSS200; TSS200; T | Island | TRUE | I | 17 |
| | | N11; SLFN11; SLFN11 | SS200; TSS200; TS | | | | |
| | | | S200 | | | | |
| 1542 | cg14395298 | | | Island | NA | I | 13 |
| 1543 | cg14399930 | FBXO47 | TSS200 | | NA | I | 17 |
| 1544 | cg14400354 | GALNTI2 | Body | S_Shore | NA | I | 9 |
| 1545 | cg14409023 | OTX2OS1 | Body | N_Shore | NA | I | 14 |
| 1546 | cg14428146 | NKX2-6 | TSS200 | Island | TRUE | I | 8 |
| 1547 | cg14448830 | | | N_Shore | NA | I | 9 |
| 1548 | cg14454796 | MTERFD2; MTERFD2 | Body; Body; 3′UTR; | | NA | I | 2 |
| | | ; SNED1; MTERFD2 | Body | | | | |
| 1549 | cg14454907 | | | N_Shelf | NA | II | 2 |
| 1550 | cg14478768 | HMHA1 | Body | Island | NA | II | 19 |
| 1551 | cg14480116 | SPRED2; SPRED2 | TSS1500; Body | | NA | II | 2 |
| 1552 | cg14482313 | KRT7 | TSS200 | Island | NA | I | 12 |
| 1553 | cg14503815 | | | | TRUE | II | 9 |
| 1554 | cg14511739 | APC; APC; APC | TSS200; TSS200; 5′ | | NA | I | 5 |
| | | | UTR | | | | |
| 1555 | cg14514403 | ARX | TSS200 | Island | NA | I | X |
| 1556 | cg14515517 | MYO3A | 5′UTR | S_Shelf | NA | II | 10 |
| 1557 | cg14537713 | | | N_Shore | NA | I | 6 |
| 1558 | cg14556896 | | | Island | NA | II | 12 |
| 1559 | cg14557185 | WWTR1; WWTR1; W | Body; Body; Body | Island | NA | I | 3 |
| | | WTR1 | | | | | |
| 1560 | cg14575053 | HMSD | TSS200 | | TRUE | I | 18 |
| 1561 | cg14576896 | GJD2 | 1stExon | Island | NA | I | 15 |
| 1562 | cg14578879 | SIM1 | Body | N_Shore | TRUE | II | 6 |
| 1563 | cg14603098 | ACCN1 | TSS1500 | Island | NA | I | 17 |
| 1564 | cg14604568 | PDE1C | 5′UTR | Island | NA | I | 7 |
| 1565 | cg14605874 | | | N_Shore | NA | II | 6 |
| 1567 | cg14613540 | HMSD | TSS1500 | | TRUE | II | 18 |
| 1568 | cg14616251 | GRHL3; GRHL3; GRH | TSS1500; Body; TS | Island | NA | II | 1 |
| | | L3 | S1500 | | | | |
| 1569 | cg14618996 | ADAM32 | TSS200 | N_Shore | NA | II | 8 |
| 1570 | cg14633455 | ZFP37 | TSS200 | Island | NA | I | 9 |
| 1571 | cg14642432 | A2BP1 A2BP1 | 5′UTR; 5′UTR | Island | NA | II | 16 |
| 1572 | cg14643001 | | | N_Shelf | TRUE | II | 3 |
| 1573 | cg14643390 | | | | TRUE | II | 7 |
| 1574 | cg14643537 | | | S_Shore | NA | II | 6 |
| 1575 | cg14646111 | SEC23B; SEC23B; SEC | 5′UTR; 5′UTR; 5′UT | S_Shore | NA | I | 20 |
| | | 23B | R | | | | |
| 1576 | cg14651249 | BARHL1 | 3′UTR | Island | TRUE | II | 9 |
| 1577 | cg14651254 | ATAD3A; ATAD3A; A | 5′UTR; Body; Body | S_Shore | NA | I | 1 |
| | | TAD3A | | | | | |
| 1578 | cg14663264 | | | Island | NA | I | 1 |
| 1579 | cg14666564 | HOXD3 | 5′UTR | S_Shore | NA | I | 2 |
| 1580 | cg14686949 | GABRE; MIR452 | Body; TSS1500 | | NA | II | X |
| 1581 | cg14696535 | HIST1H3G; HIST1H2 | TSS1500; TSS200 | N_Shore | NA | II | 6 |
| | | BI | | | | | |
| 1582 | cg14700679 | | | | TRUE | I | 2 |
| 1583 | cg14714797 | AHRR | Body | Island | NA | I | 5 |
| 1584 | cg14717557 | SIM1 | Body | N_Shore | TRUE | II | 6 |
| 1585 | cg14759284 | SRPX; SRPX; SRPX; S | TSS200; TSS200; T | S_Shore | NA | II | X |
| | | RPX | SS200; TSS200 | | | | |
| 1586 | cg14762784 | ATF6B; ATF6B; FKBP | TSS1500; TSS1500 | N_Shore | NA | II | 6 |
| | | L | ; Body | | | | |
| 1587 | cg14762973 | ZSWIM2 | TSS200 | Island | TRUE | II | 2 |
| 1588 | cg14765959 | | | Island | NA | I | 6 |
| 1589 | cg14776962 | HIST1H2BH; HIST1H | 1stExon; TSS1500 | Island | NA | II | 6 |
| | | 3F | | | | | |
| 1590 | cg14781189 | KCNH7; KCNH7; KCN | 1stExon; 5′UTR; 1st | | NA | I | 2 |
| | | H7; KCNH7 | Exon; 5′UTR | | | | |
| 1591 | cg14808890 | HIST1H2BH; HIST1H | TSS1500; 1stExon | Island | NA | II | 6 |
| | | 3F | | | | | |
| 1592 | cg14817655 | ZFP42 | TSS200 | Island | NA | I | 4 |
| 1593 | cg14824495 | SOX15 | 1stExon | Island | NA | II | 17 |
| 1594 | cg14825976 | C18orf1; C18orf1; C18o | TSS1500; Body; Bo | | TRUE | II | 18 |
| | | rf1; C18orf1 | dy; TSS1500 | | | | |
| 1595 | cg14826331 | CNP | Body | S_Shore | NA | I | 17 |
| 1596 | cg14843688 | | | | TRUE | II | 1 |
| 1597 | cg14846965 | C18orf1; C18orf1; C18o | TSS200; Body; Bod | | TRUE | I | 18 |
| | | rf1; C18orf1 | y; TSS200 | | | | |
| 1598 | cg14869505 | ATP5B; SNORD59B | Body; TSS200 | N_Shore | NA | II | 12 |
| 1599 | cg14871932 | GCK; GCK; GCK | Body; Body; Body | Island | NA | I | 7 |
| 1600 | cg14883291 | ME3; ME3; ME3 | TSS1500; TSS200; | S_Shore | NA | II | 11 |
| | | | TSS1500 | | | | |
| 1601 | cg14885748 | | | Island | TRUE | I | 12 |
| 1602 | cg14889643 | BCL2; BCL2 | Body; Body | Island | NA | I | 18 |
| 1603 | cg14903097 | C2orf43 | TSS1500 | S_Shore | NA | II | 2 |
| 1604 | cg14914046 | | | | TRUE | II | 6 |
| 1605 | cg14926717 | FLJ43390 | TSS200 | Island | NA | I | 14 |
| 1606 | cg14934253 | | | N_Shore | NA | II | 6 |
| 1607 | cg14943113 | | | S_Shore | TRUE | II | 14 |
| 1608 | cg14951132 | NRK | Body | Island | NA | I | X |
| 1609 | cg14959260 | SLC2A9; SLC2A9 | Body; Body | | NA | II | 4 |
| 1610 | cg14961598 | MTMR8 | Body | N_Shore | NA | I | X |
| 1611 | cg14962032 | CASP8; CASP8; CASP | 5′UTR; 5′UTR; 5′UT | | TRUE | II | 2 |
| | | 8; CASP8; CASP8 | R; 5′UTR; TSS200 | | | | |
| 1612 | cg14968543 | | | Island | NA | II | 8 |
| 1613 | cg14989988 | ATXN7L1; ATXN7L1 | Body; TSS1500 | | TRUE | II | 7 |
| 1614 | cg14996220 | ALX1 | TSS1500 | N_Shore | NA | I | 12 |
| 1615 | cg14997942 | | | | TRUE | II | 10 |
| 1616 | cg15012484 | | | Island | NA | I | 6 |
| 1617 | cg15013801 | ASCC1; C19orf104 | TSS1500; 5′UTR | S_Shore | NA | I | 10 |
| 1618 | cg15026277 | TMEM106A | TSS200 | Island | NA | I | 17 |
| 1619 | cg15028507 | C7orf50; C7orf50; C7or | Body; Body; Body | S_Shore | NA | I | 7 |
| | | f50 | | | | | |
| 1620 | cg15035437 | | | | NA | I | X |
| 1621 | cg15043384 | WWTR1; WWTR1; W | Body; Body; Body | Island | NA | I | 3 |
| | | WTR1 | | | | | |
| 1622 | cg15054725 | | | Island | NA | I | 2 |
| 1623 | cg15056128 | KRT222 | TSS200 | | NA | II | 17 |
| 1624 | cg15059608 | C3orf14 | TSS1500 | S_Shore | NA | II | 3 |
| 1625 | cg15060599 | | | Island | NA | I | 3 |
| 1626 | cg15077070 | IL1RL2 | TSS200 | N_Shore | NA | II | 2 |
| 1627 | cg15080119 | HIST1H2BH; HIST1H | 3′UTR; 1stExon; TS | S_Shore | NA | II | 6 |
| | | 2BH; HIST1H3F | S1500 | | | | |
| 1628 | cg15089705 | | | N_Shore | NA | II | 18 |
| 1629 | cg15095922 | NDUFS6; MRPL36 | TSS1500; TSS1500 | Island | NA | I | 5 |
| 1630 | cg15114474 | | | Island | TRUE | I | 11 |
| 1631 | cg15131808 | | | Island | NA | I | 5 |
| 1632 | cg15132013 | SKI | Body | S_Shelf | NA | II | 1 |
| 1633 | cg15133018 | | | Island | NA | I | 18 |
| 1634 | cg15140465 | PAK1; PAK1 | 5′UTR; 5′UTR | Island | NA | II | 11 |
| 1635 | cg15141467 | EFNA4; EFNA4; EFNA | TSS1500; TSS1500 | Island | NA | I | 1 |
| | | 4 | ; TSS1500 | | | | |
| 1636 | cg15160263 | | | Island | NA | I | 5 |
| 1637 | cg15162392 | QPCT | TSS200 | Island | TRUE | I | 2 |
| 1638 | cg15169940 | TBCB; POLR2I | TSS1500; 3′UTR | Island | NA | I | 19 |
| 1639 | cg15177902 | FBXO17; FBXO17 | 5′UTR; 1stExon | Island | TRUE | II | 19 |
| 1640 | cg15203028 | MUC6 | Body | Island | NA | I | 11 |
| 1641 | cg15215612 | | | Island | NA | I | 19 |
| 1642 | cg15219228 | TULP1 | Body | Island | TRUE | I | 6 |
| 1643 | cg15243542 | PURB; PURB | 3′UTR; 1stExon | | NA | II | 7 |
| 1644 | cg15265102 | | | N_Shore | NA | II | 17 |
| 1645 | cg15266705 | | | Island | NA | I | 12 |
| 1646 | cg15267232 | GATA3; GATA3 | Body; Body | Island | NA | I | 10 |
| 1647 | cg15285250 | NXPH1 | Body | Island | NA | II | 7 |
| 1648 | cg15291243 | LHX1 | Body | Island | NA | II | 17 |
| 1649 | cg15292275 | | | Island | NA | II | 13 |
| 1650 | cg15339075 | PARK2; PARK2; PAR | Body; Body; Body | | TRUE | II | 6 |
| | | K2 | | | | | |
| 1651 | cg15345437 | SNORD22; SNORD31; | TSS1500; Body; Bo | N_Shelf | NA | II | 11 |
| | | SNHG1 | dy | | | | |
| 1652 | cg15368905 | HTR1B | 1stExon | Island | NA | I | 6 |
| 1653 | cg15375469 | CPVL; CPVL | TSS200; TSS200 | | TRUE | II | 7 |
| 1654 | cg15379185 | EVX1 | 1stExon | Island | TRUE | I | 7 |
| 1655 | cg15386434 | MXRA8 | Body | Island | TRUE | I | 1 |
| 1656 | cg15386964 | HIST1H2BH; HIST1H | TSS1500; 1stExon | Island | NA | I | 6 |
| | | 3F | | | | | |
| 1657 | cg15392549 | | | | TRUE | II | 6 |
| 1658 | cg15394142 | HMGA2; HMGA2 | Body; Body | | TRUE | II | 12 |
| 1659 | cg15398152 | TNXB | Body | | NA | II | 6 |
| 1660 | cg15400655 | ZNF718 | Body | S_Shore | NA | I | 4 |
| 1661 | cg15401418 | SEPT9; SEPT9; SEPT9; | 5′UTR; 5′UTR; Bod | | TRUE | I | 17 |
| | | SEPT9 | y; 1stExon | | | | |
| 1662 | cg15412759 | TFAP2D | Body | Island | NA | II | 6 |
| 1663 | cg15420720 | STC2 | Body | N_Shelf | TRUE | II | 5 |
| 1664 | cg15423357 | | | | TRUE | I | 2 |
| 1665 | cg15436123 | RGS12; RGS12; RGS12 | Body; Body; Body | | TRUE | I | 4 |
| 1666 | cg15442728 | C14orf159; C14orf159; | TSS200; TSS200; T | | NA | II | 14 |
| | | C14orf159; C14orf159; | SS200; TSS200; TS | | | | |
| | | C14orf159 | S1500 | | | | |
| 1667 | cg15445000 | MED1 | TSS1500 | S_Shore | NA | II | 17 |
| 1668 | cg15447787 | | | Island | NA | I | 15 |
| 1669 | cg15455643 | COL4A2 | Body | S_Shore | NA | II | 13 |
| 1670 | cg15465051 | | | | TRUE | II | 3 |
| 1671 | cg15468095 | PYCARD; PYCARD | TSS200; TSS200 | S_Shore | NA | II | 16 |
| 1672 | cg15473084 | | | Island | TRUE | II | 5 |
| 1673 | cg15496063 | CYS1 | TSS1500 | Island | NA | II | 2 |
| 1674 | cg15496864 | | | Island | TRUE | II | 10 |
| 1675 | cg15504461 | | | N_Shore | NA | II | 3 |
| 1676 | cg15511022 | | | N_Shelf | NA | II | X |
| 1677 | cg15523060 | MIBD3L1 | TSS1500 | | NA | II | 19 |
| 1678 | cg15534561 | | | | NA | II | 5 |
| 1679 | cg15580075 | NCRNA00167; PRDM | TSS1500; 5′UTR; 5′ | N_Shore | NA | II | 11 |
| | | 10; PRDMIO | UTR | | | | |
| 1680 | cg15595525 | GPR123 | 3′UTR | N_Shore | NA | II | 10 |
| 1681 | cg15610027 | DTNA; DTNA; DTNA; | TSS200; 5′UTR; 5′U | | TRUE | II | 18 |
| | | DTNA | TR; 5′UTR | | | | |
| 1682 | cg15611912 | RGS10 | Body | N_Shore | NA | II | 10 |
| 1683 | cg15621260 | FIBIN; FIBIN | 5′UTR; 1stExon | | TRUE | I | 11 |
| 1684 | cg15654259 | | | Island | TRUE | I | 1 |
| 1685 | cg15680288 | | | | TRUE | I | 4 |
| 1686 | cg15680620 | ANKRD45 | TSS200 | S_Shore | NA | II | 1 |
| 1687 | cg15682101 | | | S_Shelf | NA | II | 6 |
| 1688 | cg15727252 | SYT11 | Body | S_Shore | NA | II | 1 |
| 1689 | cg15732851 | ATP2B4; ATP2B4 | 5′UTR; 5′UTR | Island | NA | I | 1 |
| 1690 | cg15754153 | PLEKHH2 | 5′UTR | S_Shore | NA | II | 2 |
| 1691 | cg15759056 | ABCB1 | 5′UTR | Island | TRUE | I | 7 |
| 1692 | cg15778054 | KCTD14 | TSS200 | | NA | I | 11 |
| 1693 | cg15779837 | GRIN2D | Body | Island | TRUE | I | 19 |
| 1694 | cg15790037 | ARL5C | Body | Island | NA | I | 17 |
| 1695 | cg15814504 | | | Island | NA | II | 5 |
| 1696 | cg15827779 | CDC42BPB | TSS1500 | S_Shore | NA | I | 14 |
| 1697 | cg15843567 | MYO3A; MYO3A | 1stExon; 5′UTR | Island | NA | I | 10 |
| 1698 | cg15850390 | CDX4 | Body | S_Shore | TRUE | I | X |
| 1699 | cg15866977 | NOTUM | TSS1500 | Island | NA | I | 17 |
| 1700 | cg15874629 | MAOB; MAOB | 1stExon; 5′UTR | Island | NA | I | X |
| 1701 | cg15904664 | ASPG | Body | Island | NA | I | 14 |
| 1702 | cg15910208 | KLK10; KLK10; KLK1 | 5′UTR; 5′UTR; 5′UT | Island | NA | II | 19 |
| | | 0 | R | | | | |
| 1703 | cg15916192 | | | Island | TRUE | II | 12 |
| 1704 | cg15920791 | | | Island | NA | I | 8 |
| 1705 | cg15932013 | FLJ22536 | TSS200 | Island | NA | I | 6 |
| 1706 | cg15952370 | OR8D2 | TSS1500 | | NA | II | 11 |
| 1707 | cg15953310 | | | Island | TRUE | I | X |
| 1708 | cg15959715 | GAD2; GAD2 | Body; Body | Island | NA | I | 10 |
| 1709 | cg15963552 | C3orf26; FILIP1L; MIR | Body; Body; Body; 1 | N_Shore | NA | I | 3 |
| | | 548G; FILIP1L; FILIP1 | stExon; 5′UTR; Bod | | | | |
| | | L; FILIP1L | Y | | | | |
| 1710 | cg15965006 | STK19; STK19; STK19 | TSS200; TSS1500; | N_Shore | NA | I | 6 |
| | | ; DOM3Z | TSS1500; Body | | | | |
| 1711 | cg15972331 | FGF14; FGF14 | Body; TSS1500 | S_Shore | NA | I | 13 |
| 1712 | cg15973954 | | | | NA | II | 13 |
| 1713 | cg15982972 | | | | NA | II | 5 |
| 1714 | cg15984661 | CCDC8; CCDC8 | 1stExon; 5′UTR | N_Shore | NA | II | 19 |
| 1715 | cg15992535 | NRG2; NRG2; NRG2; N | Body; Body; Body; | Island | NA | I | 5 |
| | | RG2 | Body | | | | |
| 1716 | cg15994026 | CD38 | Body | Island | TRUE | I | 4 |
| 1717 | cg16045423 | APOBEC3B | TSS1500 | | TRUE | II | 22 |
| 1718 | cg16072304 | | | S_Shore | NA | II | 5 |
| 1719 | cg16101148 | | | S_Shore | NA | II | 12 |
| 1720 | cg16111259 | MAGI2 | Body | | TRUE | II | 7 |
| 1721 | cg16117799 | PRDM8 | 5′UTR | S_Shore | NA | I | 4 |
| 1722 | cg16132520 | AKR1B1 | TSS200 | Island | NA | I | 7 |
| 1723 | cg16133088 | EFCAB4B; EFCAB4B; | TSS200; TSS200; T | Island | TRUE | I | 12 |
| | | EFCAB4B | SS200 | | | | |
| 1724 | cg16167741 | NFYC; NFYC; NFYC; | 5′UTR; 5′UTR; 5′UT | | NA | II | 1 |
| | | NFYC; NFYC | R; 5′UTR; 5′UTR | | | | |
| 1725 | cg16182936 | IQSEC1 | Body | | TRUE | I | 3 |
| 1726 | cg16195091 | LOC283999 | Body | N_Shore | NA | I | 17 |
| 1727 | cg16201038 | CDX2 | TSS1500 | Island | TRUE | I | 13 |
| 1728 | cg16201883 | FSCN2; FSCN2 | 1stExon; 1stExon | Island | NA | I | 17 |
| 1729 | cg16215203 | ADCY4 | TSS200 | Island | NA | I | 14 |
| 1730 | cg16246242 | | | | TRUE | II | 7 |
| 1731 | cg16258337 | | | N_Shore | TRUE | II | 4 |
| 1732 | cg16259229 | | | | NA | II | 5 |
| 1733 | cg16289929 | | | N_Shore | NA | II | 5 |
| 1734 | cg16296754 | | | N_Shore | TRUE | II | 17 |
| 1735 | cg16300300 | | | N_Shore | NA | I | 13 |
| 1736 | cg16303918 | FEV | Body | N_Shore | NA | II | 2 |
| 1737 | cg16312163 | ALDHIL1; ALDHIL1 | 5′UTR; 1stExon | Island | TRUE | II | 3 |
| 1738 | cg16322479 | EXOC3; C5orf55 | 5′UTR; TSS1500 | S_Shore | NA | II | 5 |
| 1739 | cg16329197 | | | Island | TRUE | II | 12 |
| 1740 | cg16332224 | MOCS3; DPM1 | 1stExon; TSS1500 | S_Shore | NA | II | 20 |
| 1741 | cg16354520 | LCE2A | 3′UTR | | NA | II | 1 |
| 1742 | cg16357179 | DKFZp434L192 | TSS1500 | | NA | II | 7 |
| 1743 | cg16366686 | SEPT9; SEPT9; SEPT9; | 5′UTR; 5′UTR; Bod | | TRUE | II | 17 |
| | | SEPT9 | y; 1stExon | | | | |
| 1744 | cg16373000 | C7orf50; C7orf50; C7or | Body; Body; Body | S_Shore | NA | II | 7 |
| | | f50 | | | | | |
| 1745 | cg16377609 | | | S_Shore | NA | II | 7 |
| 1746 | cg16382584 | 11-Sep | Body | | TRUE | II | 4 |
| 1747 | cg16401529 | PABPC5; PABPC5 | 5′UTR; 1stExon | Island | NA | I | X |
| 1748 | cg16406225 | | | N_Shore | TRUE | II | 14 |
| 1749 | cg16413687 | ALX1 | TSS1500 | N_Shore | NA | I | 12 |
| 1750 | cg16413715 | UNC5A | Body | Island | NA | II | 5 |
| 1751 | cg16414561 | ARX; ARX | 1stExon; 5′UTR | Island | NA | I | X |
| 1752 | cg16448058 | TLX1NB | 5′UTR | N_Shelf | NA | I | 10 |
| 1753 | cg16459265 | C7orf40; SNORA9 | Body; Body | N_Shore | NA | II | 7 |
| 1754 | cg16462006 | | | | TRUE | II | 14 |
| 1755 | cg16469740 | HDAC9; HDAC9 | Body; Body | | TRUE | II | 7 |
| 1756 | cg16473141 | REC8; REC8; REC8; RE | 1stExon; 1stExon; 5′ | Island | TRUE | II | 14 |
| | | C8 | UTR; 5′UTR | | | | |
| 1757 | cg16475478 | | | | NA | II | 7 |
| 1758 | cg16490191 | UNKL | 5′UTR | N_Shore | TRUE | II | 16 |
| 1759 | cg16507965 | ARX | TSS200 | Island | NA | I | X |
| 1760 | cg16509851 | | | Island | NA | I | 4 |
| 1761 | cg16515238 | FAM70A; FAM70A; F | Body; Body; Body | Island | NA | I | X |
| | | AM70A | | | | | |
| 1762 | cg16524733 | TAGLN; TAGLN; TAG | 5′UTR; 1stExon; 5′U | | NA | I | 11 |
| | | LN; TAGLN | TR; 1stExon | | | | |
| 1763 | cg16530382 | FBXO47 | TSS200 | | NA | II | 17 |
| 1764 | cg16539957 | | | N_Shore | NA | II | 14 |
| 1765 | cg16559570 | RTEL1; RTEL1 | Body; Body | Island | NA | I | 20 |
| 1766 | cg16565394 | SIM1 | Body | N_Shore | NA | II | 6 |
| 1767 | cg16570157 | EFCAB4A | Body | Island | NA | I | 11 |
| 1768 | cg16589135 | | | Island | NA | I | 3 |
| 1769 | cg16590821 | LONRF3; LONRF3 | TSS1500; TSS1500 | Island | NA | I | X |
| 1770 | cg16596691 | SNRPA | Body | S_Shelf | NA | II | 19 |
| 1771 | cg16618605 | GABRE; M1R452 | Body; TSS200 | | NA | II | X |
| 1772 | cg16620382 | TTBK1 | TSS200 | Island | NA | I | 6 |
| 1773 | cg16640855 | NEUROD1 | Body | | TRUE | I | 2 |
| 1774 | cg16643088 | CSRNP1 | 5′UTR | S_Shelf | TRUE | II | 3 |
| 1775 | cg16653620 | | | Island | NA | II | 2 |
| 1776 | cg16664405 | | | Island | NA | I | 10 |
| 1777 | cg16675381 | | | | NA | II | 6 |
| 1778 | cg16683770 | | | Island | TRUE | I | 20 |
| 1779 | cg16692973 | FAM70A; FAM70A; F | 1stExon; 5′UTR; 5′U | Island | NA | I | X |
| | | AM70A; FAM70A; FA | TR; 1stExon; 1stExo | | | | |
| | | M70A; FAM70A | n; 5′UTR | | | | |
| 1780 | cg16695483 | NID2 | TSS1500 | Island | NA | I | 14 |
| 1781 | cg16705697 | | | | NA | I | 11 |
| 1782 | cg16709294 | SFR55; SFR55; LOC10 | Body; Body; TSS15 | S_Shore | NA | I | 14 |
| | | 028951 | 00 | | | | |
| 1783 | cg16718276 | C1orf86; LOC1001280 | Body; TSS200; Bod | N_Shore | NA | I | 1 |
| | | 03; C1orf86 | y | | | | |
| 1784 | cg16718624 | ROB02; ROB02 | 1stExon; 5′UTR | S_Shore | NA | I | 3 |
| 1785 | cg16732616 | DMRTA2 | Body | Island | NA | I | 1 |
| 1786 | cg16733705 | | | | NA | I | 12 |
| 1787 | cg16739441 | KCNJ8 | Body | | NA | II | 12 |
| 1788 | cg16744973 | | | N_Shelf | NA | II | 20 |
| 1789 | cg16747109 | PITX2; PITX2; PITX2 | TSS1500; Body; Bo | Island | NA | II | 4 |
| | | | dy | | | | |
| 1790 | cg16749578 | NR2F6 | TSS1500 | S_Shore | NA | II | 19 |
| 1791 | cg16763089 | LOC149837 | TSS200 | | NA | II | 20 |
| 1792 | cg16768018 | ZIC4; ZIC4; ZIC4; ZIC4 | Body; Body; Body; | Island | NA | I | 3 |
| | | ; ZIC4 | Body; Body | | | | |
| 1793 | cg16772207 | MYT1 | TSS200 | | NA | II | 20 |
| 1794 | cg16773115 | TPD52; TPD52; TPD52 | Body; 5′UTR; 1stEx | | TRUE | II | 8 |
| | | ; TPD52 | on; Body | | | | |
| 1795 | cg16773899 | EDIL3; EDIL3 | 5′UTR; 1stExon | Island | NA | II | 5 |
| 1796 | cg16800165 | FLRT2 | TSS200 | N_Shore | NA | II | 14 |
| 1797 | cg16803596 | GATA4 | TSS1500 | Island | TRUE | I | 8 |
| 1798 | cg16804284 | FOXG1 | 1stExon | Island | NA | II | 14 |
| 1799 | cg16819028 | PKP1; PKP1 | TSS1500; TSS1500 | N_Shore | NA | II | 1 |
| 1800 | cg16831623 | BMP2 | 5′UTR | N_Shore | NA | II | 20 |
| 1801 | cg16833110 | OR2D3 | TSS200 | | NA | II | 11 |
| 1802 | cg16842053 | CARD11; CARD11 | 1stExon; 5′UTR | | TRUE | I | 7 |
| 1803 | cg16855845 | DNASE2 | Body | N_Shore | NA | II | 19 |
| 1804 | cg16869108 | VHL; VHL | Body; Body | S_Shore | NA | II | 3 |
| 1805 | cg16894819 | | | N_Shelf | NA | II | 1 |
| 1806 | cg16927242 | MEIS1 | Body | S_Shelf | NA | II | 2 |
| 1807 | cg16968020 | GABRA3 | Body | | NA | II | X |
| 1808 | cg16998564 | | | | TRUE | II | 1 |
| 1809 | cg17004353 | CARS; CARS; CARS; C | Body; Body; 5′UTR; | | NA | I | 11 |
| | | ARS | Body | | | | |
| 1810 | cg17032646 | SLC6A17 | TSS1500 | N_Shore | TRUE | II | 1 |
| 1811 | cg17034390 | | | Island | NA | I | 6 |
| 1812 | cg17052266 | CPVL; CPVL | TSS200; TSS200 | | TRUE | II | 7 |
| 1813 | cg17071446 | | | N_Shore | TRUE | II | 4 |
| 1814 | cg17080882 | TGFBR3 | Body | | TRUE | II | 1 |
| 1815 | cg17084751 | ZNF215 | Body | | NA | II | 11 |
| 1816 | cg17093995 | VWC2 | Body | Island | NA | I | 7 |
| 1817 | cg17094985 | | | Island | TRUE | I | 3 |
| 1818 | cg17098995 | CAT | 3′UTR | | NA | I | 11 |
| 1819 | cg17099568 | | | N_Shore | NA | II | 8 |
| 1820 | cg17100761 | EPO | TSS1500 | N_Shore | TRUE | I | 7 |
| 1821 | cg17101165 | | | Island | NA | II | 12 |
| 1822 | cg17105834 | ASTN1; ASTN1 | 1stExon; 1stExon | Island | TRUE | I | 1 |
| 1823 | cg17109725 | | | S_Shelf | NA | II | 1 |
| 1824 | cg17110524 | | | Island | NA | II | 6 |
| 1825 | cg17160382 | GJA1 | 5′UTR | | NA | I | 6 |
| 1826 | cg17160886 | C6orf141 | 1stExon | Island | TRUE | II | 6 |
| 1827 | cg17163760 | CPVL; CPVL | TSS200; TSS200 | | TRUE | II | 7 |
| 1828 | cg17177455 | | | Island | NA | II | 2 |
| 1829 | cg17201760 | ZNF876P | Body | Island | NA | II | 4 |
| 1830 | cg17202313 | SOX2OT | Body | Island | NA | I | 3 |
| 1831 | cg17214381 | ZFP42 | TSS1500 | Island | NA | I | 4 |
| 1832 | cg17214408 | | | | NA | I | X |
| 1833 | cg17235702 | | | Island | NA | II | 7 |
| 1834 | cg17237063 | RBMS3; RBMS3; RBM | 1stExon; 1stExon; 1 | | NA | II | 3 |
| | | S3 | stExon | | | | |
| 1835 | cg17241776 | DLEU7 | 1stExon | Island | NA | I | 13 |
| 1836 | cg17242351 | ACTC1 | Body | | NA | I | 15 |
| 1837 | cg17266581 | MBP; MBP | Body; Body | Island | NA | I | 18 |
| 1838 | cg17276590 | EMX2OS; EMX2; EM | Body; Body; Body | Island | NA | I | 10 |
| | | X2 | | | | | |
| 1839 | cg17280346 | ZIC1 | TSS1500 | N_Shore | NA | I | 3 |
| 1840 | cg17284804 | TCTEXID1 | TSS200 | Island | TRUE | I | 1 |
| 1841 | cg17292384 | COX8A | 3′UTR | S_Shore | NA | II | 11 |
| 1842 | cg17302155 | PRDM13 | Body | Island | NA | I | 6 |
| 1843 | cg17305181 | CRH; CRH | 1stExon; 5′UTR | S_Shore | NA | I | 8 |
| 1844 | cg17315500 | | | Island | TRUE | I | 12 |
| 1845 | cg17332573 | HIST1H2BH; HIST1H | TSS1500; TSS200 | N_Shore | NA | II | 6 |
| | | 3F | | | | | |
| 1846 | cg17342759 | PPP2R2B; PPP2R2B | TSS1500; TSS1500 | | NA | II | 5 |
| 1847 | cg17344516 | | | Island | TRUE | I | 5 |
| 1848 | cg17361163 | EMID2 | TSS200 | Island | NA | II | 7 |
| 1849 | cg17374727 | LUZP6; MTPN | 5′UTR; Body | | TRUE | II | 7 |
| 1850 | cg17380661 | SIM1 | TSS1500 | Island | NA | I | 6 |
| 1851 | cg17385175 | | | Island | NA | I | X |
| 1852 | cg17392573 | | | Island | NA | I | 6 |
| 1853 | cg17394649 | HCG4 | Body | Island | NA | I | 6 |
| 1854 | cg17407511 | SRPX; SRPX; SRPX; S | TSS200; TSS200; T | S_Shore | NA | II | X |
| | | RPX | SS200; TSS200 | | | | |
| 1855 | cg17410236 | FLRT2; FLRT2 | 1stExon; 5′UTR | Island | NA | I | 14 |
| 1856 | cg17435901 | SLC39A7; RXRB; SLC | Body; TSS1500; Bo | S_Shore | NA | I | 6 |
| | | 39A7 | dy | | | | |
| 1857 | cg17440085 | | | | NA | II | 11 |
| 1858 | cg17448336 | | | N_Shore | NA | II | 3 |
| 1859 | cg17499941 | LOC645323 | Body | N_Shore | NA | II | 5 |
| 1860 | cg17529435 | | | Island | NA | I | X |
| 1861 | cg17544952 | MEOX2 | Body | | NA | II | 7 |
| 1862 | cg17546247 | ZIC4; ZIC1 | TSS1500; TSS1500 | N_Shore | TRUE | II | 3 |
| 1863 | cg17555825 | | | Island | NA | I | 5 |
| 1864 | cg17559156 | SLC43A1 | Body | S_Shelf | NA | II | 11 |
| 1865 | cg17560340 | RNMTL1; GLOD4 | TSS1500; Body | N_Shore | NA | II | 17 |
| 1866 | cg17562247 | FAM70A; FAM70A; F | Body; Body; Body | N_Shore | NA | II | X |
| | | AM70A | | | | | |
| 1867 | cg17569842 | RGS12; RGS12; RGS12 | Body; TSS200; Bod | N_Shelf | TRUE | II | 4 |
| 1868 | cg17570276 | EIF2AK1; EIF2AK1 | TSS1500; TSS1500 | S_Shore | NA | I | 7 |
| 1869 | cg17594860 | AKR7A3 | TSS200 | Island | NA | I | 1 |
| 1870 | cg17600231 | TSC22D1; TSC22D1 | 3′UTR; 3′UTR | N_Shelf | TRUE | II | 13 |
| 1871 | cg17602451 | BCL2; BCL2 | Body; Body | Island | NA | II | 18 |
| 1872 | cg17608490 | FEV | Body | N_Shore | NA | II | 2 |
| 1873 | cg17609804 | TBRG4; TBRG4; TBR | Body; Body; Body | N_Shelf | NA | II | 7 |
| | | G4 | | | | | |
| 1874 | cg17618327 | MADIL1; MADIL1; M | Body; Body; Body | | TRUE | I | 7 |
| | | ADIL1 | | | | | |
| 1875 | cg17630392 | NPR3 | 1stExon | Island | NA | II | 5 |
| 1876 | cg17632299 | LECT1; LECT1 | Body; Body | N_Shore | TRUE | I | 13 |
| 1877 | cg17641904 | C9orf4 | 1stExon | Island | NA | I | 9 |
| 1878 | cg17647537 | FITR3B | Body | | NA | II | 11 |
| 1879 | cg17647884 | GNRH1; GNRH1 | TSS200; TSS200 | | NA | II | 8 |
| 1880 | cg17665652 | ANK2; ANK2; ANK2 | Body; Body; Body | | TRUE | II | 4 |
| 1881 | cg17675712 | | | | TRUE | II | 2 |
| 1882 | cg17683110 | | | Island | NA | II | 16 |
| 1883 | cg17684207 | LOC285796 | TSS1500 | | NA | I | 6 |
| 1884 | cg17684657 | SYCP2L | TSS200 | N_Shore | NA | II | 6 |
| 1885 | cg17696160 | PAX9 | Body | Island | NA | II | 14 |
| 1886 | cg17705066 | GIPC3 | Body | Island | NA | I | 19 |
| 1887 | cg17711567 | LYPD5 | TSS1500 | Island | NA | II | 19 |
| 1888 | cg17717124 | TCL1A; TCL1A | TSS1500; TSS1500 | Island | NA | II | 14 |
| 1889 | cg17718302 | HIST1H3J | TSS200 | S_Shore | NA | II | 6 |
| 1890 | cg17720013 | IGFL4 | TSS1500 | | NA | II | 19 |
| 1891 | cg17721249 | ATP2B4; ATP2B4 | 5′UTR; 5′UTR | Island | TRUE | I | 1 |
| 1892 | cg17722002 | | | Island | NA | II | 7 |
| 1893 | cg17739038 | HIC1 | TSS1500 | Island | NA | I | 17 |
| 1894 | cg17740140 | TOP1 | Body | S_Shore | NA | II | 20 |
| 1895 | cg17759535 | NR5A2; NR5A2 | Body; Body | N_Shore | NA | II | 1 |
| 1896 | cg17795240 | GATA4 | Body | S_Shore | NA | II | 8 |
| 1897 | cg17797229 | | | S_Shore | TRUE | II | 13 |
| 1898 | cg17800442 | CTF1; CTF1 | Body; Body | S_Shelf | NA | II | 16 |
| 1899 | cg17804356 | NR5A2; NR5A2 | Body; Body | Island | NA | II | 1 |
| 1900 | cg17816394 | GNG4; GNG4; GNG4; | TSS1500; 1stExon; | Island | NA | I | 1 |
| | | GNG4; GNG4 | 5′UTR; 1stExon; 5′U | | | | |
| | | | TR | | | | |
| 1901 | cg17820591 | ENO3; ENO3 | TSS1500; TSS1500 | Island | NA | II | 17 |
| 1902 | cg17847344 | EBF1 | Body | S_Shore | TRUE | II | 5 |
| 1903 | cg17862447 | KLHL29 | 5′UTR | | TRUE | I | 2 |
| 1904 | cg17891759 | | | Island | NA | I | 4 |
| 1905 | cg17897699 | | | | NA | II | 8 |
| 1906 | cg17922359 | | | Island | NA | I | 4 |
| 1907 | cg17933583 | | | S_Shore | NA | I | 6 |
| 1908 | cg17933722 | | | Island | TRUE | II | 1 |
| 1909 | cg17939059 | LOC728661; CDK11B; | Body; Body; Body; | S_Shore | NA | II | 1 |
| | | CDK11B; CDK11B; C | Body; Body; Body; 5 | | | | |
| | | DK11B; CDK11B; CD | ′UTR | | | | |
| | | K11B | | | | | |
| 1910 | cg17941572 | | | Island | NA | I | 1 |
| 1911 | cg17980508 | IFI44L | TSS1500 | | NA | II | 1 |
| 1912 | cg17990771 | | | | TRUE | II | 6 |
| 1913 | cg18000886 | ARX | TSS200 | Island | NA | I | X |
| 1914 | cg18018027 | | | N_Shore | NA | I | 6 |
| 1915 | cg18022005 | | | N_Shelf | NA | II | X |
| 1916 | cg18032812 | | | S_Shore | NA | I | 7 |
| 1917 | cg18034737 | ZFP42 | TSS200 | Island | NA | II | 4 |
| 1918 | cg18044383 | | | Island | NA | I | 18 |
| 1919 | cg18062721 | VGLL4; VGLL4 | Body; Body | | TRUE | I | 3 |
| 1920 | cg18063733 | | | Island | TRUE | I | 5 |
| 1921 | cg18065318 | C4orf49; C4orf49 | 5′UTR; 1stExon | Island | NA | I | 4 |
| 1922 | cg18070676 | FLRT2 | 5′UTR | Island | NA | I | 14 |
| 1923 | cg18091469 | | | Island | TRUE | I | 2 |
| 1924 | cg18093372 | | | Island | NA | I | 2 |
| 1925 | cg18096722 | | | Island | NA | II | 8 |
| 1926 | cg18102233 | ARX | TSS200 | Island | NA | I | X |
| 1927 | cg18108623 | SLFN11; SLFN11; SLF | TSS1500; TSS1500 | Island | TRUE | II | 17 |
| | | N11; SLFN11; SLFN11 | ; TSS1500; TSS150 | | | | |
| | | | 0; TSS1500 | | | | |
| 1928 | cg18117600 | | | Island | NA | I | 15 |
| 1929 | cg18118147 | SYT3; SYT3; SYT3 | Body; Body; Body | Island | NA | I | 19 |
| 1930 | cg18118685 | GALNT13 | 5′UTR | Island | NA | I | 2 |
| 1931 | cg18127012 | | | | TRUE | II | 4 |
| 1932 | cg18128969 | NCAM2 | TSS1500 | Island | NA | II | 21 |
| 1933 | cg18130044 | | | N_Shore | NA | I | 20 |
| 1934 | cg18132916 | | | Island | TRUE | I | 6 |
| 1935 | cg18133357 | ADARB2 | Body | | NA | I | 10 |
| 1936 | cg18142856 | OR10A3 | TSS200 | | NA | II | 11 |
| 1937 | cg18147485 | KCNV1; KCNV1 | 5′UTR; 1stExon | Island | TRUE | I | 8 |
| 1938 | cg18177414 | | | Island | NA | I | 7 |
| 1939 | cg18186343 | M1R770; MEG3; MEG3 | TSS1500; Body; Bo | | NA | II | 14 |
| | | ; MEG3 | dy; Body | | | | |
| 1940 | cg18257955 | SNORD115-15; | Body; Body; TSS15 | | NA | II | 15 |
| | | SNORD115-21; | 00 | | | | |
| | | SNORDI15-22 | | | | | |
| 1941 | cg18297736 | NKX6-1 | Body | N_Shore | NA | II | 4 |
| 1942 | cg18327669 | SSTR1 | TSS1500 | N_Shore | NA | II | 14 |
| 1943 | cg18333041 | CLSTN2 | Body | | TRUE | II | 3 |
| 1944 | cg18342462 | C11orf88; C11orf88 | 1stExon; 1stExon | Island | NA | I | 11 |
| 1945 | cg18345826 | SYCP2L | TSS200 | N_Shore | NA | II | 6 |
| 1946 | cg18347921 | HLA-J; NCRNA00171 | Body; Body | Island | NA | I | 6 |
| 1947 | cg18355562 | | | | TRUE | II | 7 |
| 1948 | cg18358894 | | | Island | TRUE | I | 7 |
| 1949 | cg18388552 | | | | NA | I | 6 |
| 1950 | cg18395636 | RAB38 | TSS200 | S_Shore | NA | I | 11 |
| 1951 | cg18397279 | PCDH11X | 5′UTR | Island | NA | I | X |
| 1952 | cg18397998 | C1orf86; LOC1001280 | Body; TSS1500; Bo | N_Shore | NA | I | 1 |
| | | 03; C1orf86 | dy | | | | |
| 1953 | cg18401367 | | | Island | NA | I | 5 |
| 1954 | cg18405691 | OR4C15 | 1stExon | | NA | II | 11 |
| 1955 | cg18420599 | DTNA; DTNA; DTNA; | TSS200; 5′UTR; 5′U | | TRUE | II | 18 |
| | | DTNA | TR; 5′UTR | | | | |
| 1956 | cg18423469 | DLGAP1; DLGAP1 | Body; Body | N_Shelf | NA | II | 18 |
| 1957 | cg18435674 | KRT222 | Body | | TRUE | II | 17 |
| 1958 | cg18437710 | KLK10; KLK10; KLK1 | 5′UTR; 5′UTR; 1stE | S_Shore | NA | I | 19 |
| | | 0; KLK10 | xon; 5′UTR | | | | |
| 1959 | cg18447419 | SLC9A3 | Body | N_Shore | NA | I | 5 |
| 1960 | cg18460175 | ETV2 | TSS200 | N_Shore | NA | II | 19 |
| 1961 | cg18461584 | | | | TRUE | II | 7 |
| 1962 | cg18465515 | HIST1H2BI | TSS200 | N_Shore | NA | II | 6 |
| 1963 | cg18470427 | SLFN12L | Body | | NA | I | 17 |
| 1964 | cg18472159 | | | Island | NA | II | 5 |
| 1965 | cg18479593 | | | Island | NA | II | 14 |
| 1966 | cg18492126 | NCAM2 | TSS1500 | Island | NA | II | 21 |
| 1967 | cg18503031 | MITF; MITF; MITF | Body; Body; TSS20 | | NA | II | 3 |
| 1968 | cg18512515 | | | N_Shore | NA | I | 15 |
| 1969 | cg18524788 | | | N_Shore | TRUE | I | 7 |
| 1970 | cg18527241 | ATXN7L1; ATXN7L1; | Body; 1stExon; 5′U | | NA | II | 7 |
| | | ATXN7LI | TR | | | | |
| 1971 | cg18530551 | | | Island | NA | I | 5 |
| 1972 | cg18536496 | GPRASP1; GPRASP1; | TSS1500; TSS1500 | Island | NA | I | X |
| | | GPRASP1 | ; TSS1500 | | | | |
| 1973 | cg18595258 | TMEM138; CYBASC3 | TSS1500; 5′UTR; 5′ | N_Shore | NA | II | 11 |
| | | ; CYBASC3; TMEM13 | UTR; TSS1500 | | | | |
| | | 8 | | | | | |
| 1974 | cg18608369 | SLFN11; SLFN11; SLF | TSS200; TSS200; T | Island | TRUE | I | 17 |
| | | N11; SLFN11; SLFN11 | SS200; TSS200; TS | | | | |
| | | | S200 | | | | |
| 1975 | cg18631798 | ACOX3; ACOX3 | Body; Body | | NA | I | 4 |
| 1976 | cg18636509 | | | | TRUE | II | 6 |
| 1977 | cg18639180 | C14orf159; C14orf159; | 1stExon; 1stExon; 5′ | | TRUE | II | 14 |
| | | C14orf159; C14orf159; | UTR; 1stExon; 5′UT | | | | |
| | | C14orf159; C14orf159; | R; 5′UTR; TSS1500; | | | | |
| | | C14orf159; C14orf159; | 1stExon; 5′UTR | | | | |
| | | C14orf159 | | | | | |
| 1978 | cg18653451 | CCDC8 | TSS200 | S_Shore | NA | I | 19 |
| 1979 | cg18664869 | PCDHB15 | TSS200 | N_Shore | NA | I | 5 |
| 1980 | cg18673954 | INA | TSS1500 | N_Shore | NA | I | 10 |
| 1981 | cg18682423 | SLC46A3; SLC46A3 | TSS200; TSS200 | Island | NA | I | 13 |
| 1982 | cg18688293 | NMBR | 1stExon | N_Shore | NA | II | 6 |
| 1983 | cg18703601 | ROB01 | TSS1500 | S_Shore | NA | I | 3 |
| 1984 | cg18709349 | PNMAL2 | TSS200 | Island | NA | I | 19 |
| 1985 | cg18724430 | | | N_Shore | TRUE | I | 15 |
| 1986 | cg18735015 | SH3PXD2A | Body | Island | TRUE | II | 10 |
| 1987 | cg18748888 | TNRC6C; TNRC6C | 3′UTR; 3′UTR | S_Shore | NA | I | 17 |
| 1988 | cg18755783 | SPG20; SPG20; SPG20; | 5′UTR; 5′UTR; 5′UT | Island | NA | II | 13 |
| | | SPG20 | R; 5′UTR | | | | |
| 1989 | cg18766755 | SPRR2A | 5′UTR | | NA | II | 1 |
| 1990 | cg18769353 | PTN | TSS200 | | NA | II | 7 |
| 1991 | cg18782604 | SIM1 | Body | Island | TRUE | I | 6 |
| 1992 | cg18786593 | | | S_Shore | NA | I | 2 |
| 1993 | cg18786873 | ALX3 | Body | Island | TRUE | I | 1 |
| 1994 | cg18789887 | GALNTL2 | TSS200 | | TRUE | II | 3 |
| 1995 | cg18790597 | FAM184B | TSS200 | Island | TRUE | I | 4 |
| 1996 | cg18791205 | | | N_Shore | TRUE | II | 7 |
| 1997 | cg18794839 | KCNK2; KCNK2; KCN | TSS1500; TSS1500 | Island | NA | I | 1 |
| | | K2 | ; Body | | | | |
| 1998 | cg18805027 | | | N_Shore | NA | I | 14 |
| 1999 | cg18816826 | | | | NA | II | 1 |
| 2000 | cg18844382 | EFS; EFS | TSS200; TSS200 | Island | NA | I | 14 |
| 2001 | cg18854419 | | | Island | NA | I | 11 |
| 2002 | cg18856581 | MDGA2 | TSS1500 | Island | NA | II | 14 |
| 2003 | cg18857062 | CRIP3 | Body | Island | TRUE | I | 6 |
| 2004 | cg18865445 | | | Island | TRUE | I | 13 |
| 2005 | cg18881873 | | | Island | TRUE | I | 20 |
| 2006 | cg18886245 | TFAP2B | Body | S_Shore | NA | II | 6 |
| 2007 | cg18891712 | FILIP1 | Body | | TRUE | II | 6 |
| 2008 | cg18894648 | LOC645323; LOC6453 | Body; TSS200 | N_Shore | TRUE | II | 5 |
| | | 23 | | | | | |
| 2009 | cg18907180 | | | Island | NA | II | 14 |
| 2010 | cg18914211 | HLA-G | Body | Island | NA | I | 6 |
| 2011 | cg18922629 | SSBP1; FLJ40852 | Body; TSS1500 | S_Shore | NA | II | 7 |
| 2012 | cg18950778 | WT1; WT1; WT1; WT1 | Body; Body; Body; | Island | NA | II | 11 |
| | | | Body | | | | |
| 2013 | cg18954504 | | | N_Shore | TRUE | I | 17 |
| 2014 | cg18956714 | OXGR1 | TSS200 | S_Shore | TRUE | II | 13 |
| 2015 | cg18989085 | OPCML | Body | | TRUE | II | 11 |
| 2016 | cg19022384 | | | Island | NA | I | X |
| 2017 | cg19030994 | PDCD6 | Body | S_Shore | NA | I | 5 |
| 2018 | cg19045293 | | | Island | NA | I | X |
| 2019 | cg19045644 | IGFBP7 | TSS1500 | Island | NA | I | 4 |
| 2020 | cg19102771 | CCDC140 | 5′UTR | N_Shore | NA | II | 2 |
| 2021 | cg19106893 | PTPN23 | Body | S_Shelf | NA | II | 3 |
| 2022 | cg19113530 | LOC100130691; AGPS | TSS1500; Body | S_Shore | NA | I | 2 |
| 2023 | cg19155518 | GRIK2; GR1K2; GRIK2 | Body; Body; Body | Island | TRUE | I | 6 |
| 2024 | cg19162768 | | | N_Shore | NA | II | 15 |
| 2025 | cg19170660 | HCG18; HCG18 | Body; Body | N_Shore | NA | II | 6 |
| 2026 | cg19205850 | RAB7A | 5′UTR | S_Shore | NA | II | 3 |
| 2027 | cg19235071 | | | | TRUE | II | 6 |
| 2028 | cg19247350 | HIST1H2BH; HIST1H | TSS1500; TSS200 | N_Shore | NA | II | 6 |
| | | 3F | | | | | |
| 2029 | cg19307500 | HMHA1 | Body | Island | NA | II | 19 |
| 2030 | cg19330592 | Cl4orf159; C14orf159; | 1stExon; 1stExon; 5′ | | NA | I | 14 |
| | | C14orf159; C14orf159; | UTR; 1stExon; 5′UT | | | | |
| | | C14orf159; C14orf159; | R; 5′UTR; TSS1500; | | | | |
| | | C14orf159; C14orf159; | 1stExon; 5′UTR | | | | |
| | | C14orf159 | | | | | |
| 2031 | cg19345277 | ZIM3 | 3′UTR | | NA | II | 19 |
| 2032 | cg19350360 | | | Island | NA | II | 15 |
| 2033 | cg19376851 | FLJ32063 | Body | Island | TRUE | II | 2 |
| 2034 | cg19378036 | HNF1B; HNF1B | TSS1500; TSS1500 | Island | NA | I | 17 |
| 2035 | cg19380001 | DMRTA2 | TSS1500 | Island | NA | I | 1 |
| 2036 | cg19382808 | LOC728661; CDK11B; | Body; Body; Body; | Island | NA | II | 1 |
| | | CDK11B; CDK11B; C | Body; Body Body; 5 | | | | |
| | | DK11B; CDK11B; CD | ′UTR | | | | |
| | | K11B | | | | | |
| 2037 | cg19391498 | GALM | TSS1500 | | NA | II | 2 |
| 2038 | cg19426944 | COL2A1; COL2A1 | Body; Body | N_Shore | TRUE | I | 12 |
| 2039 | cg19481013 | | | Island | NA | II | X |
| 2040 | cg19500479 | GDF7 | TSS1500 | Island | TRUE | II | 2 |
| 2041 | cg19513207 | | | Island | NA | II | 3 |
| 2042 | cg19513940 | DOK6 | Body | Island | NA | I | 18 |
| 2043 | cg19526130 | LOC729467 | Body | Island | NA | II | 1 |
| 2044 | cg19535896 | ZSWIM2; ZSWIM2 | 1stExon; 5′UTR | Island | TRUE | I | 2 |
| 2045 | cg19542346 | CDK4 | Body | N_Shore | NA | II | 12 |
| 2046 | cg19550524 | | | | NA | II | 11 |
| 2047 | cg19556343 | NCAM2 | TSS1500 | Island | NA | II | 21 |
| 2048 | cg19578835 | | | Island | NA | I | 14 |
| 2049 | cg19592336 | ZNF389 | TSS200 | | TRUE | I | 6 |
| 2050 | cg19595012 | PRDM8 | TSS200 | S_Shore | NA | I | 4 |
| 2051 | cg19595402 | SRCIN1 | Body | Island | TRUE | I | 17 |
| 2052 | cg19604907 | | | | TRUE | II | 12 |
| 2053 | cg19614643 | | | | TRUE | II | 2 |
| 2054 | cg19623012 | | | Island | TRUE | I | 11 |
| 2055 | cg19624849 | HFE2; HFE2; HFE2; HF | 5′UTR; 5′UTR; 5′UT | Island | TRUE | I | 1 |
| | | E2 | R; Body | | | | |
| 2056 | cg19653212 | GUCA1A | Body | Island | NA | I | 6 |
| 2057 | cg19667811 | | | | NA | II | 10 |
| 2058 | cg19672997 | MDGA2 | TSS1500 | Island | NA | I | 14 |
| 2059 | cg19696441 | UBXN10 | TSS200 | Island | NA | I | 1 |
| 2060 | cg19697981 | NR2E1; NR2E1 | 5′UTR; 1stExon | Island | TRUE | II | 6 |
| 2061 | cg19715094 | TMEM25; TMEM25; T | Body; Body; Body; | S_Shore | NA | II | 11 |
| | | MEM25; TMEM25; TM | Body; Body; Body | | | | |
| | | EM25; TMEM25 | | | | | |
| 2062 | cg19726408 | SH3PXD2A | Body | Island | TRUE | I | 10 |
| 2063 | cg19731655 | MAP7D2; MAP7D2; M | TSS200; Body; Bod | Island | NA | I | X |
| | | AP7D2; MAP7D2 | y; Body | | | | |
| 2064 | cg19743254 | OPCML; OPCML | Body; Body | | TRUE | II | 11 |
| 2065 | cg19777067 | | | Island | NA | I | 4 |
| 2066 | cg19793376 | BARIIL1 | Body | Island | NA | II | 9 |
| 2067 | cg19807257 | | | Island | NA | I | 1 |
| 2068 | cg19810598 | | | Island | NA | I | 1 |
| 2069 | cg19811087 | | | Island | TRUE | I | 1 |
| 2070 | cg19811994 | RASSF1; RASSF1; RA | Body; Body; Body; 5 | N_Shore | NA | II | 3 |
| | | SSF1; RASSF1 | ′UTR | | | | |
| 2071 | cg19844704 | EMX2; EMX20S; EM | Body; TSS200; Bod | Island | NA | II | 10 |
| | | X2 | Y | | | | |
| 2072 | cg19851715 | HIST1H2BI | TSS200 | N_Shore | NA | II | 6 |
| 2073 | cg19859323 | | | Island | NA | I | X |
| 2074 | cg19868631 | VSTM2A | TSS1500 | Island | NA | I | 7 |
| 2075 | cg19870698 | | | Island | NA | I | 14 |
| 2076 | cg19879075 | SPOCK2; SPOCK2 | Body; Body | Island | NA | I | 10 |
| 2077 | cg19887700 | | | Island | NA | II | 12 |
| 2078 | cg19889626 | | | Island | NA | I | 8 |
| 2079 | cg19929126 | TRIL | TSS200 | Island | NA | I | 7 |
| 2080 | cg19930575 | GABRE | 3′UTR | | NA | II | X |
| 2081 | cg19945554 | | | Island | NA | I | 15 |
| 2082 | cg19961043 | CHAD; ACSF2 | TSS1500; Body | Island | TRUE | I | 17 |
| 2083 | cg19961480 | CNR1; CNR1; CNR1; C | TSS1500; TSS1500 | Island | NA | I | 6 |
| | | NR1 | ; TSS1500; TSS150 | | | | |
| | | | 0 | | | | |
| 2084 | cg19971716 | QRFPR | 1stExon | Island | TRUE | I | 4 |
| 2085 | cg19974227 | RGS12; RGS12; RGS12 | Body; 5′UTR; 1stEx | N_Shelf | TRUE | II | 4 |
| | | ; RGS12 | on; Body | | | | |
| 2086 | cg19988492 | DYRK1A; DYRK1A; D | Body; Body; Body; | | TRUE | II | 21 |
| | | YRK1A; DYRK1A; DY | Body; Body | | | | |
| | | RK1A | | | | | |
| 2087 | cg19989295 | REC8; REC8 | TSS200; TSS200 | Island | NA | I | 14 |
| 2088 | cg19991916 | PIGB | TSS1500 | N_Shore | NA | I | 15 |
| 2089 | cg19997502 | | | S_Shore | NA | I | 2 |
| 2090 | cg20000562 | SFTA3 | Body | S_Shore | TRUE | II | 14 |
| 2091 | cg20021336 | PARK2; PARK2; PAR | Body; Body; Body | | TRUE | II | 6 |
| | | K2 | | | | | |
| 2092 | cg20041088 | | | Island | NA | II | 1 |
| 2093 | cg20055426 | | | Island | TRUE | I | 12 |
| 2094 | cg20059337 | AFF3; AFF3 | Body; Body | | TRUE | II | 2 |
| 2095 | cg20072171 | FEZF2 | Body | Island | NA | I | 3 |
| 2096 | cg20081453 | | | N_Shore | TRUE | I | X |
| 2097 | cg20101352 | CPVL; CPVL | TSS200; TSS200 | | TRUE | II | 7 |
| 2098 | cg20103519 | DOK6 | Body | Island | NA | II | 18 |
| 2099 | cg20107395 | DOK5; DOK5 | 1stExon; 5′UTR | Island | NA | I | 20 |
| 2100 | cg20120208 | TLX1 | 3′UTR | S_Shore | NA | I | 10 |
| 2101 | cg20170777 | COX10 | TSS1500 | N_Shore | NA | II | 17 |
| 2102 | cg20171396 | | | N_Shore | TRUE | II | 4 |
| 2103 | cg20202246 | | | Island | TRUE | I | X |
| 2104 | cg20229496 | | | N_Shore | TRUE | I | 19 |
| 2105 | cg20248458 | C2orf43 | 5′UTR | Island | NA | I | 2 |
| 2106 | cg20258486 | LOC154822 | TSS200 | S_Shore | NA | II | 7 |
| 2107 | cg20275132 | ZSCAN12; ZSCAN12 | TSS1500; TSS1500 | S_Shore | NA | II | 6 |
| 2108 | cg20282814 | SLC2A1 | Body | N_Shore | NA | II | 1 |
| 2109 | cg20289913 | NPFFR2 | 1stExon | Island | NA | I | 4 |
| 2110 | cg20293609 | CYR61 | Body | S_Shore | NA | I | 1 |
| 2111 | cg20295992 | | | Island | NA | II | 6 |
| 2112 | cg20297199 | BMP4; BMP4 | 5′UTR; 5′UTR | Island | NA | II | 14 |
| 2113 | cg20302533 | POU6F2; POU6F2 | Body; Body | | NA | I | 7 |
| 2114 | cg20330472 | EYA4; EYA4; EYA4 | TSS1500; TSS1500 | N_Shore | NA | II | 6 |
| | | | ; TSS1500 | | | | |
| 2115 | cg20337384 | | | Island | NA | II | 7 |
| 2116 | cg20340866 | | | N_Shore | NA | I | 12 |
| 2117 | cg20365336 | | | | TRUE | II | 6 |
| 2118 | cg20370678 | | | Island | NA | I | 17 |
| 2119 | cg20381767 | OXGR1 | TSS200 | S_Shore | TRUE | I | 13 |
| 2120 | cg20382028 | MCM3AP | Body | N_Shore | NA | II | 21 |
| 2121 | cg20394609 | EMB | Body | N_Shore | NA | II | 5 |
| 2122 | cg20395967 | MIR663 | TSS1500 | Island | NA | I | 20 |
| 2123 | cg20399509 | C21orf57 | 3′UTR | Island | NA | I | 21 |
| 2124 | cg20399616 | BCAT1 | Body | Island | TRUE | I | 12 |
| 2125 | cg20415053 | CATSPER4 | Body | | TRUE | I | 1 |
| 2126 | cg20418725 | CASP8; CASP8; CASP | 5′UTR; 5′UTR; 5′UT | | NA | II | 2 |
| | | 8; CASP8; CASP8 | R; TSS1500; 5′UTR | | | | |
| 2127 | cg20426713 | SAMID13 | TSS1500 | N_Shore | NA | II | 1 |
| 2128 | cg20435267 | ZNF354B | Body | S_Shore | NA | II | 5 |
| 2129 | cg20435725 | | | N_Shore | NA | I | 2 |
| 2130 | cg20446252 | PASD1 | Body | | NA | II | X |
| 2131 | cg20449692 | CLDN11 | 1stExon | Island | TRUE | I | 3 |
| 2132 | cg20456954 | ARFGEF1 | Body | | TRUE | II | 8 |
| 2133 | cg20504856 | | | Island | NA | II | 6 |
| 2134 | cg20520804 | PFKP | Body | S_Shore | NA | I | 10 |
| 2135 | cg20555674 | ARL5C | Body | Island | NA | II | 17 |
| 2136 | cg20573931 | IL7 | Body | | NA | II | 8 |
| 2137 | cg20600210 | APCDDIL | TSS200 | Island | NA | I | 20 |
| 2138 | cg20615848 | C18orf34; C18orf34 | TSS1500; TSS1500 | S_Shore | NA | II | 18 |
| 2139 | cg20622056 | SLC7A3; SLC7A3 | TSS200; TSS200 | S_Shore | NA | II | X |
| 2140 | cg20623601 | EPAS1 | Body | Island | NA | II | 2 |
| 2141 | cg20640433 | LAMA2; LAMA2 | TSS200; TSS200 | | TRUE | II | 6 |
| 2142 | cg20647610 | WDR69 | TSS200 | Island | TRUE | I | 2 |
| 2143 | cg20658100 | KLF12 | 5′UTR | N_Shore | NA | I | 13 |
| 2144 | cg20668321 | GRIA1; GRIA1 | 3′UTR; 3′UTR | | NA | II | 5 |
| 2145 | cg20686203 | TM7SF2 | 3′UTR | N_Shore | NA | II | 11 |
| 2146 | cg20691205 | SPG20; SPG20; SPG20; | 5′UTR; 5′UTR; 5′UT | N_Shore | NA | II | 13 |
| | | SPG20 | R; 5′UTR | | | | |
| 2147 | cg20711765 | | | | NA | II | 8 |
| 2148 | cg20711828 | LAMA2; LAMA2 | TSS200; TSS200 | | TRUE | I | 6 |
| 2149 | cg20743365 | LHX9; LHX9 | Body; Body | Island | NA | II | 1 |
| 2150 | cg20755170 | POU4F3 | 3′UTR | Island | NA | I | 5 |
| 2151 | cg20774846 | DPYS | TSS200 | S_Shore | NA | II | 8 |
| 2152 | cg20801007 | EFCAB4A | Body | Island | NA | I | 11 |
| 2153 | cg20808234 | | | Island | NA | II | 6 |
| 2154 | cg20842326 | PTPRN2; PTPRN2; PT | Body; Body; Body | Island | NA | II | 7 |
| | | PRN2 | | | | | |
| 2155 | cg20852226 | MYO7A; MYO7A; MY | Body; Body; Body | Island | NA | I | 11 |
| | | O7A | | | | | |
| 2156 | cg20883831 | KCNH2; KCNH2; KCN | TSS200; Body; Bod | Island | TRUE | I | 7 |
| | | H2 | y | | | | |
| 2157 | cg20884605 | ALDH2 | Body | S_Shore | NA | II | 12 |
| 2158 | cg20885179 | VILL | Body | Island | NA | I | 3 |
| 2159 | cg20885782 | | | Island | NA | II | 4 |
| 2160 | cg20886017 | NEK11; NEK11 | Body; Body | | TRUE | II | 3 |
| 2161 | cg20891501 | SETA3 | Body | S_Shore | NA | II | 14 |
| 2162 | cg20908789 | | | S_Shore | NA | II | 8 |
| 2163 | cg20916523 | VHL; VHL | Body; Body | S_Shore | NA | I | 3 |
| 2164 | cg20933109 | | | Island | NA | II | 14 |
| 2165 | cg20936013 | | | Island | TRUE | I | 14 |
| 2166 | cg20939084 | ZIC4; ZIC4; ZIC4; ZIC4 | Body; Body; Body; | Island | NA | II | 3 |
| | | ; ZIC4 | Body; Body | | | | |
| 2167 | cg20950033 | ELHL33 | Body | | NA | I | 14 |
| 2168 | cg20981127 | NR2F6 | TSS1500 | S_Shore | NA | II | 19 |
| 2169 | cg21033440 | SIPA1; S1PA1 | Body; Body | Island | NA | I | 11 |
| 2170 | cg21051972 | | | Island | NA | II | 11 |
| 2171 | cg21052656 | AIP | TSS1500 | N_Shore | NA | II | 11 |
| 2172 | cg21064916 | | | N_Shore | NA | I | 11 |
| 2173 | cg21101743 | LOC646999 | Body | Island | TRUE | II | 7 |
| 2174 | cg21109265 | CRIP3 | TSS200 | Island | TRUE | II | 6 |
| 2175 | cg21117965 | SPEG | Body | | TRUE | I | 2 |
| 2176 | cg21120436 | NLGN1 | 5′UTR | | NA | II | 3 |
| 2177 | cg21144063 | | | | NA | II | 7 |
| 2178 | cg21146037 | TRIB1 | 3′UTR | | NA | II | 8 |
| 2179 | cg21146184 | | | Island | TRUE | I | 22 |
| 2180 | cg21158087 | | | Island | NA | I | 17 |
| 2181 | cg21179492 | MRPS2 | Body | S_Shore | NA | I | 9 |
| 2182 | cg21183256 | | | Island | TRUE | I | 8 |
| 2183 | cg21183523 | ZNF521 | Body | N_Shore | NA | II | 18 |
| 2184 | cg21196747 | | | | NA | II | 6 |
| 2185 | cg21205978 | APOL6 | TSS1500 | | NA | II | 22 |
| 2186 | cg21211480 | TMEM106A | TSS200 | Island | NA | I | 17 |
| 2187 | cg21253087 | SNAPC4 | Body | N_Shelf | NA | I | 9 |
| 2188 | cg21253459 | | | N_Shore | TRUE | II | 15 |
| 2189 | cg21263122 | SSTR1 | TSS200 | N_Shore | NA | II | 14 |
| 2190 | cg21268422 | BACE2; BACE2; BAC | Body; Body; Body | S_Shelf | NA | I | 21 |
| | | E2 | | | | | |
| 2191 | cg21283066 | | | | TRUE | II | 6 |
| 2192 | cg21291134 | APCS | 3′UTR | | NA | II | 1 |
| 2193 | cg21293934 | ANKRD30B | TSS200 | Island | NA | I | 18 |
| 2194 | cg21350115 | CALCRL; CALCRL | 1stExon; 5′UTR | | TRUE | II | 2 |
| 2195 | cg21359793 | KRT4 | TSS1500 | | NA | II | 12 |
| 2196 | cg21359950 | CRADD | Body | | TRUE | II | 12 |
| 2197 | cg21362390 | SLITRK2; SLITRK2; S | 5′UTR; 5′UTR; 5′UT | Island | NA | I | X |
| | | LITRK2; SLITRK2; SL | R; 5′UTR; 5′UTR; 5′ | | | | |
| | | ITRK2; SLITRK2; SLI | UTR; 5 | | | | |
| | | TRK2; SLITRK2; SLIT | ′UTR; 5′UTR; 5′UT | | | | |
| | | RK2 | R | | | | |
| 2198 | cg21383487 | | | Island | TRUE | I | 10 |
| 2199 | cg21392341 | TBX15 | 5′UTR | Island | TRUE | I | 1 |
| 2200 | cg21397588 | ATP2B4; ATP2B4 | 5′UTR; 5′UTR | S_Shore | NA | II | 1 |
| 2201 | cg21461649 | CFTR | TSS200 | | NA | II | 7 |
| 2202 | cg21466913 | MAGI1; MAGI1; MAG | Body; Body; Body | | TRUE | II | 3 |
| | | I1 | | | | | |
| 2203 | cg21476673 | HOXB8 | Body | Island | NA | I | 17 |
| 2204 | cg21485303 | | | Island | NA | II | 12 |
| 2205 | cg21507095 | TBX1; TBX1; TBX1 | Body; 3′UTR; Body | Island | TRUE | II | 22 |
| 2206 | cg21526205 | ST6GALNAC3; ST6G | Body; Body | Island | NA | I | 1 |
| | | ALNAC3 | | | | | |
| 2207 | cg21532325 | WDR86 | TSS1500 | Island | NA | I | 7 |
| 2208 | cg21558752 | KRT4 | TSS1500 | | NA | II | 12 |
| 2209 | cg21560142 | BBC3; BBC3; BBC3; B | Body; Body; Body; | N_Shore | TRUE | I | 19 |
| | | BC3 | Body | | | | |
| 2210 | cg21575509 | | | Island | NA | II | 3 |
| 2211 | cg21579726 | ABT1 | 3′UTR | S_Shore | NA | II | 6 |
| 2212 | cg21590238 | C12orf43 | TSS1500 | S_Shore | NA | II | 12 |
| 2213 | cg21595968 | | | Island | NA | I | X |
| 2214 | cg21620778 | WIPF1 | TSS1500 | S_Shore | NA | I | 2 |
| 2215 | cg21635854 | | | N_Shore | NA | I | 11 |
| 2216 | cg21642176 | RAD51AP2 | TSS200 | | NA | I | 2 |
| 2217 | cg21647584 | CT45A1 | 5′UTR | | NA | II | X |
| 2218 | cg21650962 | TFAP2B | Body | S_Shelf | TRUE | II | 6 |
| 2219 | cg21654383 | | | Island | NA | I | 2 |
| 2220 | cg21663122 | HIST1H2BH; HIST1H | TSS1500; TSS200 | N_Shore | NA | II | 6 |
| | | 3F | | | | | |
| 2221 | cg21705897 | HMGCLL1; HMGCLL | TSS200; TSS200 | Island | TRUE | I | 6 |
| | | 1 | | | | | |
| 2222 | cg21707187 | | | Island | TRUE | I | 12 |
| 2223 | cg21731375 | | | Island | NA | II | 14 |
| 2224 | cg21785034 | | | N_Shore | TRUE | II | 7 |
| 2225 | cg21797452 | LOC286467 | Body | Island | NA | II | X |
| 2226 | cg21817737 | NAALAD2 | TSS200 | | NA | II | 11 |
| 2227 | cg21819468 | PDPN; PDPN; PDPN; P | TSS1500; TSS1500 | Island | NA | I | 1 |
| | | DPN | ; 1stExon; 1stExon | | | | |
| 2228 | cg21821214 | | | Island | NA | II | 2 |
| 2229 | cg21822905 | PEX10; PEX10 | Body; Body | S_Shore | NA | I | 1 |
| 2230 | cg21839338 | FAM18A | Body | Island | NA | II | 16 |
| 2231 | cg21843616 | | | S_Shore | NA | I | 4 |
| 2232 | cg21868134 | HPDL; HPDL | 1stExon; 5′UTR | Island | NA | I | 1 |
| 2233 | cg21881253 | MIR34B; BTG4; MIR3 | TSS200; TSS1500; | Island | NA | I | 11 |
| | | 4C | TSS1500 | | | | |
| 2234 | cg21883598 | DUOX2 | Body | Island | NA | I | 15 |
| 2235 | cg21883802 | FBLN5; FBLN5 | 5′UTR; 1stExon | Island | NA | I | 14 |
| 2236 | cg21884231 | SLC7A14; SLC7A14 | 5′UTR; 1stExon | Island | NA | I | 3 |
| 2237 | cg21890239 | | | Island | NA | I | X |
| 2238 | cg21890726 | | | Island | TRUE | I | 15 |
| 2239 | cg21916358 | | | Island | NA | I | 21 |
| 2240 | cg21960265 | TNXB | Body | | TRUE | I | 6 |
| 2241 | cg21981270 | ALOX5 | Body | Island | NA | II | 10 |
| 2242 | cg21985631 | | | S_Shelf | TRUE | I | 4 |
| 2243 | cg22009464 | DTNA; DTNA; DTNA; | TSS200; 5′UTR; 5′U | | TRUE | II | 18 |
| | | DTNA | TR; 5′UTR | | | | |
| 2244 | cg22012543 | | | S_Shore | NA | II | X |
| 2245 | cg22020954 | | | | NA | II | 17 |
| 2246 | cg22035501 | APC; APC; APC | TSS200; TSS200; 5′ | | NA | I | 5 |
| | | | UTR | | | | |
| 2247 | cg22058855 | | | Island | TRUE | I | 6 |
| 2248 | cg22071194 | MOCS3; DPM1 | 1stExon; TSS1500 | Island | NA | II | 20 |
| 2249 | cg22091110 | | | Island | NA | II | 18 |
| 2250 | cg22135279 | | | | NA | II | 11 |
| 2251 | cg22152728 | | | Island | NA | I | 11 |
| 2252 | cg22160073 | TRIM34; TRIM34; TRI | 5′UTR; 5′UTR; TSS | | NA | II | 11 |
| | | M34; TRIM6- | 200; Body; 5′UTR | | | | |
| | | TRIM34; TRIM34 | | | | | |
| 2253 | cg22164577 | UBR3 | Body | S_Shore | NA | II | 2 |
| 2254 | cg22190437 | SPHKAP; SPHKAP | Body; Body | N_Shore | TRUE | I | 2 |
| 2255 | cg22198397 | SLC1A6 | Body | | NA | II | 19 |
| 2256 | cg22215784 | GPM6B | Body | N_Shelf | NA | II | X |
| 2257 | cg22237200 | ATP1B2 | Body | Island | TRUE | I | 17 |
| 2258 | cg22243996 | | | | NA | II | 6 |
| 2259 | cg22244418 | OGFOD1; NUDT21 | TSS1500; Body | N_Shore | NA | II | 16 |
| 2260 | cg22248052 | TFAP2B | Body | Island | NA | I | 6 |
| 2261 | cg22260952 | CHST11 | Body | S_Shore | NA | I | 12 |
| 2262 | cg22263031 | | | | NA | I | 15 |
| 2263 | cg22280258 | ALOX15 | TSS200 | S_Shore | NA | II | 17 |
| 2264 | cg22290648 | SYCN | 1stExon | Island | NA | I | 19 |
| 2265 | cg22294740 | LINGO3 | 5′UTR | Island | NA | I | 19 |
| 2266 | cg22303045 | | | N_Shore | NA | II | 6 |
| 2267 | cg22304522 | ADCY8 | Body | | TRUE | II | 8 |
| 2268 | cg22325530 | HVCN1; HVCN1 | TSS1500; 5′UTR | Island | TRUE | II | 12 |
| 2269 | cg22340072 | | | Island | NA | I | 8 |
| 2270 | cg22359606 | NEUROD1 | TSS200 | N _Shelf | TRUE | II | 2 |
| 2271 | cg22361859 | FBXO47; FBXO47 | 1stExon; 5′UTR | | NA | I | 17 |
| 2272 | cg22370379 | | | | TRUE | II | 6 |
| 2273 | cg22388634 | VSX1 | Body | Island | NA | I | 20 |
| 2274 | cg22389730 | FCRLB | Body | Island | NA | I | 1 |
| 2275 | cg22409854 | | | Island | NA | I | 6 |
| 2276 | cg22410478 | C6or1186 | Body | Island | TRUE | I | 6 |
| 2277 | cg22443762 | LHX9; LHX9 | Body; Body | Island | NA | II | 1 |
| 2278 | cg22445447 | RTF1 | Body | S_Shelf | NA | II | 15 |
| 2279 | cg22454011 | C18orf1; C18orf1; C18o | TSS1500; Body; Bo | | TRUE | II | 18 |
| | | rf1; C18orf1 | dy; TSS1500 | | | | |
| 2280 | cg22459630 | LBXCOR1 | Body | Island | NA | I | 15 |
| 2281 | cg22462983 | EYA4; EYA4; EYA4 | TSS1500; TSS1500 | N_Shore | NA | II | 6 |
| | | | ; TSS1500 | | | | |
| 2282 | cg22473637 | MCHR2; MCHR2 | TSS200; TSS200 | Island | TRUE | I | 6 |
| 2283 | cg22483095 | SBNO2; SBNO2 | Body; Body | Island | TRUE | I | 19 |
| 2284 | cg22489153 | | | Island | NA | II | 12 |
| 2285 | cg22491927 | CACNA1A; CACNA1 | 5′UTR; 1stExon; 1st | Island | NA | I | 19 |
| | | A; CACNA1A; CACN | Exon; 5′UTR | | | | |
| | | A1A | | | | | |
| 2286 | cg22496809 | TBX18 | Body | Island | NA | I | 6 |
| 2287 | cg22502502 | TRIM38 | TSS1500 | | TRUE | II | 6 |
| 2288 | cg22508969 | HMGCLL1; HMGCLL | TSS200; TSS200 | Island | TRUE | I | 6 |
| | | 1 | | | | | |
| 2289 | cg22512438 | TRH; TRH | 5′UTR; 1stExon | Island | NA | I | 3 |
| 2290 | cg22518208 | FLRT2 | 5′UTR | Island | NA | II | 14 |
| 2291 | cg22524657 | | | Island | TRUE | I | 1 |
| 2292 | cg22549870 | | | Island | NA | I | 15 |
| 2293 | cg22558291 | LOC646405 | Body | Island | NA | I | 13 |
| 2294 | cg22571664 | NPR3 | Body | Island | NA | II | 5 |
| 2295 | cg22605919 | C17orf104 | TSS1500 | Island | TRUE | I | 17 |
| 2296 | cg22612764 | FAM3B; FAM3B | TSS200; TSS200 | N_Shore | NA | I | 21 |
| 2297 | cg22618405 | | | S_Shore | TRUE | I | 2 |
| 2298 | cg22620221 | DPP6 | TSS200 | Island | NA | I | 7 |
| 2299 | cg22629987 | QPCT | TSS200 | Island | TRUE | II | 2 |
| 2300 | cg22630918 | C10orf2; C10orf2; C10o | 1stExon; 5′UTR; 1st | Island | NA | I | 10 |
| | | rf2; C1Oorf2 | Exon; 5′UTR | | | | |
| 2301 | cg22639011 | KCNA4 | 5′UTR | Island | NA | II | 11 |
| 2302 | cg22658957 | | | Island | NA | I | X |
| 2303 | cg22694818 | LHX8 | 5′UTR | Island | TRUE | I | 1 |
| 2304 | cg22711792 | DMRTA2 | 3′UTR | Island | NA | I | 1 |
| 2305 | cg22724998 | | | N_Shore | TRUE | I | 15 |
| 2306 | cg22732749 | PCDHB15 | TSS1500 | N_Shore | NA | II | 5 |
| 2307 | cg22751696 | C3orf14 | TSS1500 | S_Shore | NA | II | 3 |
| 2308 | cg22759800 | | | Island | NA | I | 15 |
| 2309 | cg22771759 | | | Island | NA | II | 13 |
| 2310 | cg22784386 | SIM1 | Body | N_Shore | TRUE | II | 6 |
| 2311 | cg22795345 | ARHGEF7; ARTIGEF7 | Body; Body; Body; | Island | NA | I | 13 |
| | | ; ARHGEF7; ARIIGEF | Body; Body | | | | |
| | | 7; ARHGEF7 | | | | | |
| 2312 | cg22796353 | | | Island | NA | I | 7 |
| 2313 | cg22797169 | IL1RL2 | TSS200 | N_Shore | TRUE | II | 2 |
| 2314 | cg22798707 | ELAVL2; ELAVL2; EL | TSS1500; TSS1500 | Island | NA | II | 9 |
| | | AVL2 | ; 5′UTR | | | | |
| 2315 | cg22809871 | FGF14 | Body | S_Shelf | NA | I | 13 |
| 2316 | cg22827864 | | | Island | NA | II | 6 |
| 2317 | cg22844669 | | | Island | NA | II | X |
| 2318 | cg22848598 | ADAM32 | TSS200 | Island | NA | I | 8 |
| 2319 | cg22865470 | | | Island | TRUE | I | 1 |
| 2320 | cg22870775 | | | S_Shore | NA | II | 6 |
| 2321 | cg22871668 | EYA4; EYA4; EYA4 | TSS200; TSS200; T | Island | NA | I | 6 |
| | | | SS200 | | | | |
| 2322 | cg22881652 | | | S_Shore | NA | I | 4 |
| 2323 | cg22894896 | MIR193A | TSS200 | Island | NA | I | 17 |
| 2324 | cg22961278 | PRDM8 | 5′UTR | S_Shore | NA | I | 4 |
| 2325 | cg22968966 | | | Island | NA | II | 16 |
| 2326 | cg22971920 | NAA10 | Body | N_Shore | NA | II | X |
| 2327 | cg22976218 | NEUROD1 | 5′UTR | N_Shelf | NA | I | 2 |
| 2328 | cg22979093 | PTN; PTN | 5′UTR; 1stExon | | NA | II | 7 |
| 2329 | cg23003500 | VIPR1 | TSS1500 | Island | TRUE | I | 3 |
| 2330 | cg23017915 | WWTR1; WWTR1; W | Body; Body; Body | N_Shore | NA | II | 3 |
| | | WTR1 | | | | | |
| 2331 | cg23026864 | PCDHA7; PCDHA12; P | Body; Body; Body; T | Island | NA | I | 5 |
| | | CDHA6; PCDHAC1; P | SS200; Body; Body; | | | | |
| | | CDHA10; PCDHA4; P | Body; Body; Body; | | | | |
| | | CDHA11; PCDHA8; P | Body; Body; Body; | | | | |
| | | CDHA6; PCDHA1; PC | Body; Body; Body; | | | | |
| | | DHA2; PCDHA1; PCD | Body; TSS200; Bod | | | | |
| | | HA9; PCDHA13; PCD | y | | | | |
| | | HA5; PCDHA3; PCDH | | | | | |
| | | AC1; PCDHA10 | | | | | |
| 2332 | cg23028941 | EYA4; EYA4; EYA4 | Body; Body; Body | | TRUE | II | 6 |
| 2333 | cg23037133 | OXGR1 | TSS1500 | S_Shore | TRUE | II | 13 |
| 2334 | cg23049429 | ATP11A; ATP11A | Body; Body | S_Shore | NA | I | 13 |
| 2335 | cg23049458 | L1TD1; L1TD1 | 5′UTR; 5′UTR | Island | NA | I | 1 |
| 2336 | cg23056713 | NTM | Body | | TRUE | I | 11 |
| 2337 | cg23067317 | GALNTL2 | TSS200 | | TRUE | II | 3 |
| 2338 | cg23075337 | NXPH1 | Body | N_Shore | NA | II | 7 |
| 2339 | cg23085662 | | | Island | NA | II | 18 |
| 2340 | cg23090824 | PDE7B; PDE7B | 1stExon; 5′UTR | | NA | II | 6 |
| 2341 | cg23095615 | FBXO30 | TSS1500 | Island | NA | II | 6 |
| 2342 | cg23097402 | DMRTA2 | 3′UTR | Island | NA | I | 1 |
| 2343 | cg23113963 | SCNN113 | TSS1500 | Island | NA | I | 16 |
| 2344 | cg23118086 | RASL12 | Body | Island | NA | I | 15 |
| 2345 | cg23125200 | GJB6; GJB6; GJB6; GJB | TSS200; TSS200; T | Island | TRUE | I | 13 |
| | | 6 | SS200; TSS1500 | | | | |
| 2346 | cg23141355 | | | Island | NA | I | 3 |
| 2347 | cg23158731 | COL14A1 | 5′UTR | Island | NA | I | 8 |
| 2348 | cg23161999 | | | N_Shore | TRUE | I | 2 |
| 2349 | cg23166590 | | | | NA | II | 8 |
| 2350 | cg23179456 | ADCY4 | TSS200 | Island | NA | I | 14 |
| 2351 | cg23180270 | RNF113A; NDUFA1 | TSS1500; Body | S_Shore | NA | II | X |
| 2352 | cg23189410 | ZIC4; ZIC1 | TSS1500; TSS1500 | N_Shore | TRUE | I | 3 |
| 2353 | cg23191956 | FOXG1 | TSS1500 | Island | TRUE | I | 14 |
| 2354 | cg23205387 | | | Island | NA | I | 7 |
| 2355 | cg23207876 | CASP14 | TSS200 | | NA | II | 19 |
| 2356 | cg23217097 | | | N_Shore | NA | I | 14 |
| 2357 | cg23218559 | AMH | Body | Island | NA | I | 19 |
| 2358 | cg23233404 | SYCP2L | Body | Island | NA | II | 6 |
| 2359 | cg23239574 | | | S_Shore | NA | I | 1 |
| 2360 | cg23244790 | PCDHGA4; PCDHGA | Body; Body; Body; | Island | NA | 1 | 5 |
| | | 11; PCDHGA11; PCDH | Body; Body; Body; | | | | |
| | | GA9; PCDHGA1; PCD | Body; 1stExon; Bod | | | | |
| | | HGB1; P CDHGB6; PC | y; Body; Body; Body | | | | |
| | | DHGA12; PCDHGB3; | ; Body; 1stExon; Bod | | | | |
| | | PCDHGB7; PCDHGA6 | y; Body; Body; Body | | | | |
| | | ; PCDHGA8; PCDHGA | ; Body; Body; Body | | | | |
| | | 10; PCDHGA12; PCDH | | | | | |
| | | GA5; PCDHGB4; PCD | | | | | |
| | | HGA3; PCDHGA2; PC | | | | | |
| | | DHGA7; PCDHGB2; P | | | | | |
| | | CDHGB5 | | | | | |
| 2361 | cg23296408 | Cl4orf159; C14orf159; | 1stExon; 1stExon; 5′ | | TRUE | II | 14 |
| | | C14orf159; C14orf159; | UTR; 1stExon; 5′UT | | | | |
| | | C14orf159; C14orf159; | R; 5′UTR; TSS1500; | | | | |
| | | C14orf159; C14orf159; | 1stExon; 5′UTR | | | | |
| | | C14orf159 | | | | | |
| 2362 | cg23299641 | KCNE1L | 1stExon | Island | TRUE | I | X |
| 2363 | cg23303246 | NTM | Body | | TRUE | I | 11 |
| 2364 | cg23317501 | UGT3A1 | Body | | TRUE | II | 5 |
| 2365 | cg23318812 | | | Island | TRUE | I | 12 |
| 2366 | cg23328194 | ADRA1A; ADRA1A; A | Body; Body; Body; | | NA | II | 8 |
| | | DRA1A; ADRA1A | Body | | | | |
| 2367 | cg23338503 | DOCK2 | Body | Island | NA | I | 5 |
| 2368 | cg23363971 | IKZF4; IKZF4 | 1stExon; 5′UTR | | TRUE | I | 12 |
| 2369 | cg23367107 | | | Island | NA | I | 12 |
| 2370 | cg23367608 | FAM162B | 1stExon | Island | NA | II | 6 |
| 2371 | cg23371754 | ANK2; ANK2; ANK2 | Body; Body; Body | | TRUE | II | 4 |
| 2372 | cg23398076 | MEIS1 | Body | S_Shelf | NA | I | 2 |
| 2373 | cg23424003 | EMID2 | TSS200 | Island | NA | I | 7 |
| 2374 | cg23424273 | hTR1B | TSS200 | Island | NA | I | 6 |
| 2375 | cg23438893 | | | N_Shore | TRUE | II | 14 |
| 2376 | cg23440636 | | | Island | NA | II | 5 |
| 2377 | cg23449696 | ZIC1 | TSS1500 | N_Shore | NA | I | 3 |
| 2378 | cg23468045 | | | | TRUE | II | 5 |
| 2379 | cg23473396 | | | Island | TRUE | II | X |
| 2380 | cg23477967 | TFPI; TFPI; TFPI; TFPI | 1stExon; 5′UTR; 1st | | TRUE | II | 2 |
| | | STK19; STK19; STK19 | Exon; 5′UTR | | | | |
| 2381 | cg23514417 | ; DOM3Z | TSS1500; TSS1500 | N_Shore | NA | II | 6 |
| | | | ; TSS1500; Body | | | | |
| 2382 | cg23517208 | | | S_Shore | NA | I | 5 |
| 2383 | cg23519637 | C7orf50; C7orf50; C7or | Body; Body; Body | S_Shore | TRUE | II | 7 |
| | | f50 | | | | | |
| 2384 | cg23522194 | PLA2G4C; PLA2G4C; | Body; Body; Body | Island | NA | I | 19 |
| | | PLA2G4C | | | | | |
| 2385 | cg23524195 | GFRA1; GFRA1 | TSS1500; TSS1500 | Island | NA | I | 10 |
| 2386 | cg23536473 | FERD3L | 1stExon | Island | TRUE | I | 7 |
| 2387 | cg23549902 | | | Island | NA | I | 7 |
| 2388 | cg23554497 | | | S_Shore | TRUE | II | 12 |
| 2389 | cg23609450 | WFDC10B; WFDC10B | Body; Body | | NA | II | 20 |
| 2390 | cg23610453 | | | Island | TRUE | I | 10 |
| 2391 | cg23614791 | ACSS3 | TSS200 | Island | NA | I | 12 |
| 2392 | cg23624008 | | | S_Shore | TRUE | I | 1 |
| 2393 | cg23626733 | PEX10; PEX10 | TSS1500; TSS1500 | N_Shore | NA | I | 1 |
| 2394 | cg23629166 | PEX10; PEX10 | TSS1500; TSS1500 | N_Shore | NA | I | 1 |
| 2395 | cg23637354 | | | | NA | II | 6 |
| 2396 | cg23642200 | NLGN1 | 5′UTR | | NA | II | 3 |
| 2397 | cg23656300 | | | | NA | II | 10 |
| 2398 | cg23658477 | | | Island | NA | I | 12 |
| 2399 | cg23660154 | | | Island | NA | I | 1 |
| 2400 | cg23699274 | LRRK2 | TSS1500 | N_Shore | NA | II | 12 |
| 2401 | cg23715830 | | | Island | NA | I | 3 |
| 2402 | cg23720064 | SIM1 | Body | N_Shore | TRUE | II | 6 |
| 2403 | cg23759189 | NTM | Body | | NA | II | 11 |
| 2404 | cg23771603 | MYO3A | 5′UTR | Island | NA | I | 10 |
| 2405 | cg23776012 | KRT222; KRT222 | 5′UTR; 1stExon | | NA | II | 17 |
| 2406 | cg23779047 | | | | NA | I | X |
| 2407 | cg23782616 | HMSD | TSS200 | | TRUE | I | 18 |
| 2408 | cg23792314 | BCAT1 | Body | Island | TRUE | II | 12 |
| 2409 | cg23807890 | WDR69; WDR69 | 1stExon; 5′UTR | Island | TRUE | I | 2 |
| 2410 | cg23809442 | FGF14; FGF14 | Body; TSS1500 | S_Shore | NA | I | 13 |
| 2411 | cg23829990 | UNC50 | Body | S_Shore | NA | II | 2 |
| 2412 | cg23855505 | CHST11 | Body | S_Shore | NA | I | 12 |
| 2413 | cg23875663 | PCSK2 | Body | S_Shelf | NA | II | 20 |
| 2414 | cg23881566 | SRRM4 | Body | | TRUE | II | 12 |
| 2415 | cg23882545 | CASP8; CASP8; CASP | 5′UTR; 5′UTR; 5′UT | | TRUE | II | 2 |
| | | 8; CASP8; CASP8 | R; 5′UTR; TSS200 | | | | |
| 2416 | cg23913995 | | | Island | NA | I | 20 |
| 2417 | cg23915769 | LVRN | TSS1500 | N_Shore | TRUE | II | 5 |
| 2418 | cg23928468 | SLC5A6; SLC5A6 | 5′UTR; Body | N_Shore | NA | II | 2 |
| 2419 | cg23952663 | LHX8 | Body | Island | NA | I | 1 |
| 2420 | cg23965214 | FBXO47 | TSS1500 | | NA | II | 17 |
| 2421 | cg24001644 | MAP7D2; MAP7D2; M | Body; Body; Body; 1 | Island | NA | I | X |
| | | AP7D2; MAP7D2; MA | stExon; 5′UTR | | | | |
| | | P7D2 | | | | | |
| 2422 | cg24002167 | EDIL3 | Body | N_Shore | NA | II | 5 |
| 2423 | cg24008884 | ALX4 | TSS1500 | S_Shore | NA | I | 11 |
| 2424 | cg24014143 | KLHL1; KLHL1; ATX | 1stExon; 5′UTR; Bo | Island | TRUE | I | 13 |
| | | N8OS | dy | | | | |
| 2425 | cg24027397 | SOX2OT | Body | S_Shore | TRUE | II | 3 |
| 2426 | cg24041078 | BTG4; MIR34C | TSS1500; TSS1500 | Island | NA | II | 11 |
| 2427 | cg24046411 | CYBA | TSS200 | S_Shore | NA | II | 16 |
| 2428 | cg24046888 | EPAS1 | Body | Island | NA | II | 2 |
| 2429 | cg24052239 | CACNA1F | Body | Island | NA | II | X |
| 2430 | cg24061208 | ANKRD30B; ANKRD | 1stExon; 5′UTR | S_Shore | NA | II | 18 |
| | | 30B | | | | | |
| 2431 | cg24067982 | TCERG1L | Body | N_Shore | NA | II | 10 |
| 2432 | cg24074153 | MDGA2; MDGA2 | Body; Body | | TRUE | II | 14 |
| 2433 | cg24104241 | ACTA1 | Body | Island | TRUE | II | 1 |
| 2434 | cg24106636 | NHLH2; NHLH2 | 5′UTR; 5′UTR | Island | TRUE | I | 1 |
| 2435 | cg24119607 | CXXC5 | 5′UTR | N_Shore | TRUE | II | 5 |
| 2436 | cg24146349 | INTS1 | Body | N_Shore | NA | II | 7 |
| 2437 | cg24149658 | CAPN6 | TSS200 | | NA | II | X |
| 2438 | cg24150623 | MIR125B1; LOC39995 | TSS1500; Body | | TRUE | I | 11 |
| | | 9 | | | | | |
| 2439 | cg24161501 | TCTEXID1 | 5′UTR | Island | TRUE | II | 1 |
| 2440 | cg24211504 | SIM1 | Body | Island | TRUE | I | 6 |
| 2441 | cg24221648 | | | Island | TRUE | I | 13 |
| 2442 | cg24233426 | | | | NA | II | 7 |
| 2443 | cg24252695 | | | Island | NA | II | 1 |
| 2444 | cg24258699 | MSC | TSS200 | S_Shore | NA | I | 8 |
| 2445 | cg24279418 | | | N_Shore | NA | I | 3 |
| 2446 | cg24281267 | TULP1 | Body | Island | TRUE | I | 6 |
| 2447 | cg24302235 | SLC2A2 | TSS1500 | Island | TRUE | II | 3 |
| 2448 | cg24306340 | CACHD1 | Body | S_Shore | NA | II | 1 |
| 2449 | cg24315973 | GSTCD; GSTCD | TSS200; 5′UTR | S_Shore | NA | II | 4 |
| 2450 | cg24326574 | UBL4A | Body | N_Shore | TRUE | II | X |
| 2451 | cg24327132 | PKM2; PKM2; PKM2 | 5′UTR; 5′UTR; 5′UT | N_Shore | NA | II | 15 |
| | | | R | | | | |
| 2452 | cg24331301 | CDH23; CDH23 | TSS1500; TSS1500 | Island | NA | I | 10 |
| 2453 | cg24335070 | | | | TRUE | II | 2 |
| 2454 | cg24338491 | | | | TRUE | II | 12 |
| 2455 | cg24346905 | NTNG1; NTNG1; NTN | Body; Body; Body | Island | NA | I | 1 |
| | | G1 | | | | | |
| 2456 | cg24350771 | | | | NA | II | 7 |
| 2457 | cg24383507 | KCNIP2; KCNIP2; KC | Body; Body; TSS15 | N_Shelf | TRUE | I | 10 |
| | | NIP2; KCNIP2; KCNIP | 00; Body; Body; Bod | | | | |
| | | 2; KCNIP2; KCNIP2 | y; Body | | | | |
| 2458 | cg24384051 | OR8B3 | 1stExon | | NA | II | 11 |
| 2459 | cg24396429 | SLC8A1 | TSS200 | | TRUE | II | 2 |
| 2460 | cg24401557 | FGF13; FGF13; FGF13; | Body; TSS200; Bod | Island | NA | I | X |
| | | FGF13; FGF13; FGF13 | y; Body; Body; Body | | | | |
| 2461 | cg24410453 | C6orf142 | Body | | TRUE | II | 6 |
| 2462 | cg24415208 | CACNG8 | 1stExon | Island | NA | I | 19 |
| 2463 | cg24427271 | USP36 | 5′UTR | N_Shore | NA | II | 17 |
| 2464 | cg24439334 | PEX10; PEX10 | TSS1500; TSS1500 | N_Shore | NA | I | 1 |
| 2465 | cg24448259 | CPVL; CPVL; CPVL; C | 5′UTR; 1stExon; 1st | | TRUE | II | 7 |
| | | PVL | Exon; 5′UTR | | | | |
| 2466 | cg24452260 | GRIA2; GRIA2; GRIA2 | Body; Body; Body | Island | NA | II | 4 |
| 2467 | cg24472375 | | | N_Shore | NA | II | 6 |
| 2468 | cg24472939 | | | S_Shelf | NA | II | 4 |
| 2469 | cg24484138 | C20orf112 | 5′UTR | Island | NA | II | 20 |
| 2470 | cg24504927 | | | | TRUE | I | 12 |
| 2471 | cg24507144 | FGF14 | Body | Island | NA | II | 13 |
| 2472 | cg24508426 | | | Island | NA | I | 10 |
| 2473 | cg24509810 | CTNNA2; CTNNA2 | Body; Body | Island | NA | II | 2 |
| 2474 | cg24512400 | KLK10; KLK10; KLK1 | 5′UTR; 5′UTR; 5′UT | Island | NA | I | 19 |
| | | 0 | R | | | | |
| 2475 | cg24517686 | | | S_Shore | TRUE | II | 1 |
| 2476 | cg24525457 | C7orf51 | Body | Island | NA | I | 7 |
| 2477 | cg24564492 | | | Island | NA | II | 10 |
| 2478 | cg24569637 | AOX1 | TSS200 | Island | TRUE | I | 2 |
| 2479 | cg24600895 | NLGN1 | 5′UTR | | NA | II | 3 |
| 2480 | cg24601030 | DIXDC1; DIXDC1 | TSS1500; Body | N_Shore | NA | II | 11 |
| 2481 | cg24603941 | MIA2; MIA2 | 5′UTR; 1stExon | | NA | II | 14 |
| 2482 | cg24622143 | RASA3 | Body | Island | NA | II | 13 |
| 2483 | cg24625136 | | | Island | NA | I | 3 |
| 2484 | cg24626659 | C10orf93 | Body | N_Shore | NA | I | 10 |
| 2485 | cg24664038 | | | | NA | II | 6 |
| 2486 | cg24671344 | PDPN; PDPN; PDPN; P | TSS1500; TSS1500 | Island | NA | I | 1 |
| | | DPN | ; Body; Body | | | | |
| 2487 | cg24672833 | | | Island | NA | I | 17 |
| 2488 | cg24686074 | | | Island | NA | I | 10 |
| 2489 | cg24686610 | ZIC4; ZIC1 | TSS1500; TSS1500 | N_Shore | TRUE | I | 3 |
| 2490 | cg24690692 | | | | TRUE | II | 7 |
| 2491 | cg24693341 | PHOX2B | 3′UTR | N_Shore | NA | II | 4 |
| 2492 | cg24701267 | | | | TRUE | II | 3 |
| 2493 | cg24701575 | | | N_Shore | NA | II | 11 |
| 2494 | cg24710320 | MGC2889; BRASLS | TSS1500; TSS200 | Island | NA | I | 3 |
| 2495 | cg24719107 | POSTN; POSTN; POST | 5′UTR; 1stExon; 1st | | NA | II | 13 |
| | | N; POSTN; POSTN; PO | Exon; 1stExon; 5′U | | | | |
| | | STN; POSTN; POSTN | TR; 5′UTR; 1stExon | | | | |
| | | | ; 5′UTR | | | | |
| 2496 | cg24722073 | | | N_Shore | NA | I | 4 |
| 2497 | cg24725574 | HLA-J; NCRNA00171 | Body; Body | Island | TRUE | I | 6 |
| 2498 | cg24725576 | | | N_Shore | NA | II | 14 |
| 2499 | cg24727130 | ELFN1 | 5′UTR | | NA | II | 7 |
| 2500 | cg24727399 | QRFPR | TSS200 | Island | NA | I | 4 |
| 2501 | cg24728018 | CLVS2; CLVS2 | 5′UTR; 1stExon | S_Shore | NA | I | 6 |
| 2502 | cg24734254 | | | | NA | II | 1 |
| 2503 | cg24740026 | | | Island | NA | I | 5 |
| 2504 | cg24740531 | BCL2; BCL2 | Body; Body | Island | NA | I | 18 |
| 2505 | cg24771804 | ONECUT2 | Body | Island | TRUE | II | 18 |
| 2506 | cg24773418 | | | Island | NA | I | 14 |
| 2507 | cg24805875 | FAM162B | TSS200 | Island | NA | II | 6 |
| 2508 | cg24812837 | TLX1 | Body | Island | TRUE | I | 10 |
| 2509 | cg24833737 | | | S_Shore | NA | I | 8 |
| 2510 | cg24843380 | ZNF454 | TSS1500 | Island | NA | I | 5 |
| 2511 | cg24843474 | RGS7 | TSS200 | Island | NA | I | 1 |
| 2512 | cg24848035 | RG522 | TSS200 | Island | TRUE | I | 8 |
| 2513 | cg24852713 | HMHA1 | Body | Island | NA | II | 19 |
| 2514 | cg24853313 | MIR892A | Body | | NA | II | X |
| 2515 | cg24874180 | DKK2 | Body | N_Shore | NA | II | 4 |
| 2516 | cg24881834 | ME1 | TSS1500 | Island | NA | II | 6 |
| 2517 | cg24884142 | TBX15; TBX15 | 1stExon; 5′UTR | Island | TRUE | I | 1 |
| 2518 | cg24884703 | | | Island | NA | I | 1 |
| 2519 | cg24888814 | COPZ1 | Body | | TRUE | II | 12 |
| 2520 | cg24892966 | | | | NA | I | 6 |
| 2521 | cg24915503 | PCDHA7; PCDHA12; P | Body; Body; Body; | N_Shelf | NA | II | 5 |
| | | CDHA6; PCDHA10; P | Body; Body; Body; | | | | |
| | | CDHA4; PCDHA11; P | Body; Body; Body; | | | | |
| | | CDHA8; PCDHA6; PC | Body; Body; Body; | | | | |
| | | DHA1; PCDHA2; PCD | Body; Body; Body; | | | | |
| | | HA1; PCDHA9; PCDH | Body; Body | | | | |
| | | A13; PCDHA5; PCDH | | | | | |
| | | AC1; PCDHA3; PCDH | | | | | |
| | | A10 | | | | | |
| 2522 | cg24924958 | NMBR | TSS200 | Island | NA | II | 6 |
| 2523 | cg24928391 | SOX17 | TSS200 | Island | NA | I | 8 |
| 2524 | cg24932585 | | | Island | NA | I | 19 |
| 2525 | cg24939845 | | | Island | NA | I | 1 |
| 2526 | cg24945701 | | | Island | NA | I | 3 |
| 2527 | cg24956533 | LOC145845 | Body | S_Shore | NA | II | 15 |
| 2528 | cg24974737 | | | Island | TRUE | I | 17 |
| 2529 | cg24999518 | NIMH2; NHLH2 | 5′UTR; 5′UTR | Island | TRUE | II | 1 |
| 2530 | cg25029264 | C15orf26 | TSS1500 | N_Shore | NA | II | 15 |
| 2531 | cg25037730 | | | Island | TRUE | II | 14 |
| 2532 | cg25060829 | ZSCAN12; ZSCAN12 | TSS200; TSS200 | Island | NA | I | 6 |
| 2533 | cg25072733 | C13orf36 | 5′UTR | S_Shore | NA | I | 13 |
| 2534 | cg25113237 | | | Island | NA | I | 5 |
| 2535 | cg25119415 | MNDA | TSS1500 | | NA | II | 1 |
| 2536 | cg25124739 | EPAS1 | Body | Island | NA | II | 2 |
| 2537 | cg25129124 | KBTBD5 | 1stExon | Island | NA | I | 3 |
| 2538 | cg25156485 | MSN | Body | Island | NA | I | X |
| 2539 | cg25178784 | C11orf2 | Body | Island | NA | I | 11 |
| 2540 | cg25203962 | | | Island | TRUE | II | 3 |
| 2541 | cg25219333 | ARFIP2; FXC1 | Body; TSS1500 | N_Shore | NA | II | 11 |
| 2542 | cg25228422 | | | Island | NA | I | 7 |
| 2543 | cg25230235 | POLR2I; TBCB | Body; TSS1500 | Island | NA | II | 19 |
| 2544 | cg25236484 | | | Island | NA | I | X |
| 2545 | cg25243455 | PAX8; PAX8; PAX8; P | Body; Body; Body; | Island | NA | I | 2 |
| | | AX8; PAX8; LOC4408 | Body; Body; Body | | | | |
| | | 39 | | | | | |
| 2546 | cg25266629 | TLX1 | Body | Island | TRUE | I | 10 |
| 2547 | cg25271525 | | | | NA | II | 15 |
| 2548 | cg25285904 | | | Island | NA | I | 18 |
| 2549 | cg25308354 | | | Island | NA | I | 8 |
| 2550 | cg25340966 | TBX15 | TSS200 | Island | TRUE | I | 1 |
| 2551 | cg25363445 | ALX4 | Body | Island | TRUE | II | 11 |
| 2552 | cg25368103 | | | | TRUE | II | 8 |
| 2553 | cg25374649 | C18orf1; C18orf1; C18o | TSS1500; Body; Bo | | TRUE | II | 18 |
| | | rf1; C18orf1 | dy; TSS1500 | | | | |
| 2554 | cg25375162 | | | | TRUE | II | 3 |
| 2555 | cg25375916 | SLC33A1 | Body | N_Shelf | TRUE | II | 3 |
| 2556 | cg25387636 | SLC47A1 | TSS1500 | Island | NA | I | 17 |
| 2557 | cg25407876 | DNAJC9 | Body | N_Shore | NA | II | 10 |
| 2558 | cg25408008 | MIER1; WDR78; MIER | 5′UTR; TSS1500; 5′ | S_Shore | NA | II | 1 |
| | | 1; MIER1; MIER1; MIE | UTR; 5′UTR; 5′UTR | | | | |
| | | R1; MIER1; MIER1; W | ; Body; 5′UTR; Body | | | | |
| | | DR78; MIER1 | ; TSS1500; 5′UTR | | | | |
| 2559 | cg25416067 | SEPT9; SEPT9; SEPT9; | 5′UTR; 5′UTR; Bod | | TRUE | I | 17 |
| | | SEPT9 | y; 1stExon | | | | |
| 2560 | cg25456959 | ASB12 | TSS1500 | | NA | II | X |
| 2561 | cg25469406 | | | | NA | II | 11 |
| 2562 | cg25489866 | FAM81A | TSS1500 | N_Shore | NA | I | 15 |
| 2563 | cg25500080 | PCDHAC2; PCDHAC2 | 1stExon; TSS200; B | | | | |
| | | ; PCDHA7; PCDHA12; | ody; Body; Body; Bo | | | | |
| | | PCDHA6; PCDHA10; P | dy; Body; Body; Bod | | | | |
| | | CDHA4; PCDHA11; P | y; Body; Body; Body | | | | |
| | | CDHA8; PCDHA6; PC | ; Body; Body; Body; | | | | |
| | | DHA1; PCDHA2; PCD | Body; Body; Body; 5 | | | | |
| | | HA1; PCDHA9; PCDH | ′UTR; | | | | |
| | | A13; PCDHA5; PCDH | | | | | |
| | | AC1; PCDHA3; PCDH | | | | | |
| | | AC2; PCDHA10 | | | | | |
| Body | Island | NA | 1 | 5 | 140346199 | TGGGGAGT | |
| | | | | | | CAGCGAGG | |
| | | | | | | ACGGTGGG | |
| | | | | | | GCCAGGAG | |
| | | | | | | CCCTTGGG | |
| | | | | | | AGGGCCTA | |
| | | | | | | CG | |
| 2564 | cg25510164 | GBA3; GBA3 | Body; Body | | NA | II | 4 |
| 2565 | cg25510609 | AKAP13; AKAP13; AK | Body; Body; Body | | TRUE | I | 15 |
| | | AP13 | | | | | |
| 2566 | cg25514273 | KLHL1; ATXN8OS | 1stExon; Body | Island | TRUE | I | 13 |
| 2567 | cg25520146 | HPYR1 | TSS1500 | | NA | II | 8 |
| 2568 | cg25528646 | GABRE | TSS200 | Island | NA | I | X |
| 2569 | cg25556905 | ADCY4 | TSS200 | Island | NA | I | 14 |
| 2570 | cg25565383 | RAD51AP2 | TSS200 | | NA | II | 2 |
| 2571 | cg25566285 | PTPRN2; PTPRN2; PT | Body; Body; Body | S_Shelf | NA | I | 7 |
| | | PRN2 | | | | | |
| 2572 | cg25588787 | | | Island | TRUE | II | 5 |
| 2573 | cg25594119 | | | N_Shore | NA | I | 18 |
| 2574 | cg25597760 | | | Island | NA | I | 17 |
| 2575 | cg25599924 | ACOX3; ACOX3 | Body; Body | | NA | II | 4 |
| 2576 | cg25602651 | DCAF8L1 | TSS200 | | NA | II | X |
| 2577 | cg25608973 | C2orf43 | 5′UTR | N_Shore | NA | II | 2 |
| 2578 | cg25610702 | CRIP3 | TSS1500 | S_Shore | TRUE | I | 6 |
| 2579 | cg25645064 | | | | TRUE | I | 3 |
| 2580 | cg25648436 | ZSCAN1 | Body | Island | NA | I | 19 |
| 2581 | cg25662926 | ZFHX4; LOC10019237 | 5′UTR; Body | S_Shore | NA | I | 8 |
| | | 8 | | | | | |
| 2582 | cg25663755 | VILL | Body | N_Shore | NA | II | 3 |
| 2583 | cg25690715 | SEPT9; SEPT9; SEPT9 | 5′UTR; TSS200; Bo | | TRUE | II | 17 |
| | | | dy | | | | |
| 2584 | cg25691167 | FERD3L | 1stExon | Island | TRUE | I | 7 |
| 2585 | cg25705558 | ISLR2; LOC283731; IS | 5′UTR; TSS1500; T | Island | NA | II | 15 |
| | | LR2; ISLR2; ISLR2; ISL | 551500; TSS1500; 1 | | | | |
| | | R2 | stExon; TSS200 | | | | |
| 2586 | cg25708328 | | | N_Shelf | NA | II | 2 |
| 2587 | cg25726664 | GLI3 | TSS1500 | Island | NA | I | 7 |
| 2588 | cg25729795 | FLJ30058 | Body | Island | NA | II | X |
| 2589 | cg25731337 | MAGEA5 | TSS200 | | NA | II | X |
| 2590 | cg25734928 | | | N_Shelf | NA | II | 6 |
| 2591 | cg25741487 | | | Island | NA | I | 3 |
| 2592 | cg25755283 | TBX15 | 5′UTR | N_Shore | NA | II | 1 |
| 2593 | cg25760325 | TR1ML1 | TSS1500 | | NA | II | 4 |
| 2594 | cg25763036 | | | N_Shelf | NA | I | 4 |
| 2595 | cg25773917 | GPR183; UBAC2; UBA | 3′UTR; Body; Body; | | NA | II | 13 |
| | | C2; UBAC2 | Body | | | | |
| 2596 | cg25775494 | NR2E1 | Body | N_Shore | TRUE | I | 6 |
| 2597 | cg25782847 | C11orf88; C11orf88 | TSS200; TSS200 | Island | NA | I | 11 |
| 2598 | cg25800765 | ALX1 | TSS1500 | N_Shore | NA | II | 12 |
| 2599 | cg25810857 | 9-Sep | Body | S_Shore | NA | II | 17 |
| 2600 | cg25830182 | NKX6-1 | Body | N_Shore | NA | II | 4 |
| 2601 | cg25834768 | CAMKK1; CAMKK1; | 5′UTR; 5′UTR; 5′UT | Island | TRUE | I | 17 |
| | | CAMKK1 | R | | | | |
| 2602 | cg25849196 | | | N_Shore | TRUE | I | 2 |
| 2603 | cg25859468 | MEOX2; MEOX2 | 1stExon; 5′UTR | | NA | I | 7 |
| 2604 | cg25872852 | RPL 2; SNORA52 | Body; TSS200 | S_Shore | NA | II | 11 |
| 2605 | cg25884711 | NPY; NPY | 5′UTR; 1stExon | Island | NA | I | 7 |
| 2606 | cg25887010 | | | Island | NA | II | X |
| 2607 | cg25896644 | | | Island | TRUE | I | 11 |
| 2608 | cg25913520 | | | N_Shore | TRUE | I | 4 |
| 2609 | cg25923056 | EGLN2; EGLN2; EGL | 1stExon; 5′UTR; 5′U | N_Shore | NA | I | 19 |
| | | N2 | TR | | | | |
| 2610 | cg25928819 | | | N_Shore | NA | I | 12 |
| 2611 | cg25947619 | AKAP13; AKAP13; AK | Body; Body; Body | | TRUE | I | 15 |
| | | AP13 | | | | | |
| 2612 | cg25951981 | GABRA4 | TSS200 | Island | NA | I | 4 |
| 2613 | cg25961816 | | | | TRUE | II | 6 |
| 2614 | cg25971727 | ACSS3 | TSS1500 | N_Shore | NA | I | 12 |
| 2615 | cg25977026 | KDM1A; KDM1A | Body; Body | S_Shore | NA | II | 1 |
| 2616 | cg25996119 | NKX2-1 | TSS1500 | Island | NA | I | 14 |
| 2617 | cg26000619 | AMH | Body | Island | NA | I | 19 |
| 2618 | cg26043257 | CD38 | 1stExon | Island | TRUE | II | 4 |
| 2619 | cg26043322 | OR10J5 | TSS1500 | | NA | II | 1 |
| 2620 | cg26053697 | COL4A2 | Body | S_Shore | NA | I | 13 |
| 2621 | cg26104752 | TBX15 | 5′UTR | S_Shore | NA | II | 1 |
| 2622 | cg26127662 | HOXA3; HOXA3; HO | 5′UTR; TSS1500; 5′ | N_Shore | NA | II | 7 |
| | | XA3 | UTR | | | | |
| 2623 | cg26132320 | MMP9 | Body | Island | NA | I | 20 |
| 2624 | cg26151163 | ILKAP | 3′UTR | | NA | II | 2 |
| 2625 | cg26158950 | FLJ22536 | Body | S_Shore | NA | II | 6 |
| 2626 | cg26165269 | | | Island | NA | II | 17 |
| 2627 | cg26221992 | | | Island | NA | II | 6 |
| 2628 | cg26222247 | ANPEP | 5′UTR | Island | NA | II | 15 |
| 2629 | cg26232247 | RIN2 | Body | | TRUE | I | 20 |
| 2630 | cg26237681 | SYCP2L; SYCP2L | 1stExon; 5′UTR | Island | NA | II | 6 |
| 2631 | cg26238975 | MIR134; MIR668; MIR | TSS1500; TSS1500 | | NA | I | 14 |
| | | 382; MIR485 | ; Body; TSS1500 | | | | |
| 2632 | cg26246880 | PYHIN1; PYHIN1; PY | TSS1500; TSS1500 | | NA | II | 1 |
| | | HIN1; PYHIN1 | ; TSS1500; TSS150 | | | | |
| | | | 0 | | | | |
| 2633 | cg26251098 | NTM | Body | | TRUE | II | 11 |
| 2634 | cg26253438 | ATP2B4; ATP2B4 | 5′UTR; 5′UTR | Island | TRUE | I | 1 |
| 2635 | cg26261502 | | | N_Shore | NA | II | 11 |
| 2636 | cg26262482 | CACHD1 | Body | S_Shore | NA | II | 1 |
| 2637 | cg26263234 | LRRC3B | 5′UTR | Island | NA | I | 3 |
| 2638 | cg26272220 | ACSS3; ACSS3 | 1stExon; 5′UTR | Island | NA | I | 12 |
| 2639 | cg26277556 | | | | TRUE | II | 14 |
| 2640 | cg26282792 | ZSCAN1 | Body | Island | NA | I | 19 |
| 2641 | cg26296488 | DRD5 | TSS200 | Island | NA | I | 4 |
| 2642 | cg26299756 | | | N_Shelf | NA | II | 6 |
| 2643 | cg26310256 | EGFL6; EGFL6 | Body; Body | S_Shore | TRUE | II | X |
| 2644 | cg26335602 | ZNF389 | 5′UTR | | TRUE | II | 6 |
| 2645 | cg26345888 | DAB1 | TSS200 | S_Shore | NA | I | 1 |
| 2646 | cg26354128 | KIAA1409 | 5′UTR | Island | NA | I | 14 |
| 2647 | cg26359388 | LOC286467 | Body | N_Shelf | NA | II | X |
| 2648 | cg26363759 | SPSB1 | 5′UTR | | TRUE | I | 1 |
| 2649 | cg26383972 | FITR2C | TSS1500 | N_Shore | NA | I | X |
| 2650 | cg26385743 | IMP4 | Body | S_Shore | NA | II | 2 |
| 2651 | cg26394257 | ADAM32 | TSS200 | N_Shore | NA | II | 8 |
| 2652 | cg26396492 | RIN2 | Body | | TRUE | II | 20 |
| 2653 | cg26398467 | | | | TRUE | I | 3 |
| 2654 | cg26398921 | | | Island | NA | II | 1 |
| 2655 | cg26404669 | CCDC65 | TSS200 | | TRUE | I | 12 |
| 2656 | cg26419656 | KLF12 | 5′UTR | N_Shore | NA | I | 13 |
| 2657 | cg26420013 | NSUN2; SRD5A1 | Body; TSS1500 | N_Shore | NA | II | 5 |
| 2658 | cg26432539 | SPATA8 | 1stExon | | NA | II | 15 |
| 2659 | cg26434983 | | | Island | NA | I | 15 |
| 2660 | cg26444528 | PCDH17 | 1stExon | Island | NA | I | 13 |
| 2661 | cg26447413 | GAS1 | 1stExon | Island | NA | II | 9 |
| 2662 | cg26449787 | EYA4; EYA4; EYA4 | TSS1500; TSS1500 | Island | NA | II | 6 |
| | | | ; TSS1500 | | | | |
| 2663 | cg26459372 | ADCY1 | TSS1500 | Island | TRUE | I | 7 |
| 2664 | cg26465602 | | | Island | TRUE | I | 16 |
| 2665 | cg26466587 | MCHR2; MCHR2 | TSS200; TSS200 | Island | TRUE | I | 6 |
| 2666 | cg26499055 | SIM1 | Body | Island | NA | I | 6 |
| 2667 | cg26503653 | DOCK2 | TSS1500 | N_Shore | NA | II | 5 |
| 2668 | cg26517171 | TLX3 | TSS1500 | Island | NA | I | 5 |
| 2669 | cg26530061 | | | S_Shore | NA | II | 7 |
| 2670 | cg26530341 | TNFRSF10A | TSS1500 | S_Shore | NA | II | 8 |
| 2671 | cg26530706 | DTNA; DTNA; DTNA; | TSS200; 5′UTR; 5′U | | TRUE | II | 18 |
| | | DTNA | TR; 5′UTR | | | | |
| 2672 | cg26560222 | DMRTA2; DMRTA2 | 1stExon; 5′UTR | Island | NA | I | 1 |
| 2673 | cg26560414 | CMTM3; CMTM3; CM | 5′UTR; 5′UTR; 5′UT | Island | NA | I | 16 |
| | | TM3; CMTM3; CMTM | R; 1stExon; TSS200 | | | | |
| | | 3 | | | | | |
| 2674 | cg26561986 | USP44; USP44 | 5′UTR; 5′UTR | N_Shelf | NA | II | 12 |
| 2675 | cg26567423 | FLJ12825 | Body | Island | NA | I | 12 |
| 2676 | cg26573704 | ADAMTS12 | TSS200 | Island | NA | II | 5 |
| 2677 | cg26583474 | RPS7 | Body | S_Shore | NA | II | 2 |
| 2678 | cg26596964 | | | Island | NA | I | 10 |
| 2679 | cg26597539 | PTGER4 | 5′UTR | Island | NA | II | 5 |
| 2680 | cg26603632 | | | N_Shore | NA | I | 17 |
| 2681 | cg26605683 | STC2 | Body | N_Shelf | TRUE | I | 5 |
| 2682 | cg26615127 | DNAJC6 | Body | Island | TRUE | I | 1 |
| 2683 | cg26618965 | | | Island | TRUE | I | 8 |
| 2684 | cg26623444 | | | Island | TRUE | I | 7 |
| 2685 | cg26625629 | C2orf43 | TSS200 | Island | NA | I | 2 |
| 2686 | cg26628435 | BEX1; BEX1 | 5′UTR; 1stExon | Island | NA | I | X |
| 2687 | cg26631984 | | | N_Shore | NA | I | 2 |
| 2688 | cg26650638 | | | Island | NA | I | 16 |
| 2689 | cg26677406 | SLCO3A1; SLCO3A1 | Body; Body | | TRUE | II | 15 |
| 2690 | cg26678970 | | | S_Shore | NA | I | 13 |
| 2691 | cg26679855 | | | N_Shelf | NA | II | 3 |
| 2692 | cg26702958 | FLJ41350 | Body | Island | TRUE | I | 10 |
| 2693 | cg26708220 | MEIS2; MEIS2; MEIS2 | Body; Body; Body; | Island | NA | I | 15 |
| | | ; MEIS2; MEIS2; MEIS | Body; Body Body; | | | | |
| | | 2; MEIS2 | Body | | | | |
| 2694 | cg26717763 | | | S_Shore | NA | I | 6 |
| 2695 | cg26751645 | RBPJL | Body | Island | NA | I | 20 |
| 2696 | cg26755141 | SIM1 | Body | N_Shore | TRUE | II | 6 |
| 2697 | cg26764761 | JPH3 | Body | S_Shelf | NA | I | 16 |
| 2698 | cg26767897 | XDH | Body | | NA | II | 2 |
| 2699 | cg26769720 | | | Island | NA | I | 7 |
| 2700 | cg26772854 | | | Island | TRUE | II | 3 |
| 2701 | cg26796095 | SAFB | Body | S_Shore | NA | II | 19 |
| 2702 | cg26799474 | CASP8; CASP8; CASP | 5′UTR; 5′UTR; 5′UT | | NA | II | 2 |
| | | 8; CASP8 | R; 5′UTR | | | | |
| 2703 | cg26814276 | GALNTL6 | TSS1500 | Island | NA | I | 4 |
| 2704 | cg26822986 | ANKRD29 | Body | Island | NA | II | 18 |
| 2705 | cg26827394 | UBE2I; UBE2I; UBE2I; | 5′UTR; 5′UTR; 5′UT | N_Shore | TRUE | I | 16 |
| | | UBE2I | R; 5′UTR | | | | |
| 2706 | cg26835675 | SHISA9 | Body | | TRUE | II | 16 |
| 2707 | cg26836696 | | | N_Shore | NA | I | 5 |
| 2708 | cg26837708 | YBX1 | Body | S_Shore | NA | II | 1 |
| 2709 | cg26848718 | WT1; WT1; WT1; WT1 | Body; Body; Body; | Island | NA | I | 11 |
| | | | Body | | | | |
| 2710 | cg26855689 | HGS | 3′UTR | N_Shore | NA | I | 17 |
| 2711 | cg26870192 | SLC35D3 | TSS1500 | N_Shore | NA | I | 6 |
| 2712 | cg26870638 | ZXDC; ZXDC | Body; Body | N_Shore | TRUE | II | 3 |
| 2713 | cg26874872 | | | | TRUE | II | 16 |
| 2714 | cg26891410 | TAL1 | TSS1500 | N_Shore | NA | II | 1 |
| 2715 | cg26896572 | C3orf14 | TSS1500 | Island | NA | II | 3 |
| 2716 | cg26917140 | | | N_Shore | TRUE | II | 1 |
| 2717 | cg26926076 | LAMA2; LAMA2 | Body; Body | | TRUE | I | 6 |
| 2718 | cg26926612 | | | Island | NA | I | 1 |
| 2719 | cg26929261 | ARL10 | TSS1500 | N_Shore | NA | I | 5 |
| 2720 | cg26937500 | CARD11; CARD11 | 1stExon; 5′UTR | | TRUE | I | 7 |
| 2721 | cg26954695 | MZF1; MGC2752; LOC | TSS1500; TSS1500 | N_Shore | NA | I | 19 |
| | | 100131691; MZF1 | ; Body; TSS1500 | | | | |
| 2722 | cg26954968 | SIM1 | Body | Island | TRUE | I | 6 |
| 2723 | cg26966124 | SIMI | TSS1500 | Island | TRUE | II | 6 |
| 2724 | cg26979473 | PTN; PTN | 5′UTR; 1stExon | | NA | II | 7 |
| 2725 | cg26983177 | | | Island | TRUE | I | 19 |
| 2726 | cg26992010 | | | N_Shore | TRUE | II | 15 |
| 2727 | cg26993198 | | | S_Shore | NA | I | 5 |
| 2728 | cg26996175 | | | Island | NA | II | 11 |
| 2729 | cg27014380 | | | Island | NA | I | 3 |
| 2730 | cg27032232 | DPP6; DPP6 | 1stExon; 5′UTR | Island | NA | I | 7 |
| 2731 | cg27036111 | SLC6A5 | TSS1500 | S_Shore | NA | II | 11 |
| 2732 | cg27039467 | HN1L | Body | S_Shore | NA | II | 16 |
| 2733 | cg27039662 | | | Island | TRUE | I | 8 |
| 2734 | cg27062369 | DDIT4L | 5′UTR | Island | NA | I | 4 |
| 2735 | cg27071152 | LOC646999 | Body | Island | TRUE | I | 7 |
| 2736 | cg27080287 | | | Island | NA | I | X |
| 2737 | cg27088150 | | | N_Shore | NA | I | 3 |
| 2738 | cg27096043 | ATP11A; ATP11A | Body; Body | S_Shore | TRUE | II | 13 |
| 2739 | cg27109600 | FLJ32063 | TSS1500 | N_Shore | NA | I | 2 |
| 2740 | cg27112666 | | | N_Shore | NA | I | 6 |
| 2741 | cg27116888 | SALL3 | Body | | TRUE | I | 18 |
| 2742 | cg27120816 | CDH8 | TSS200 | Island | NA | I | 16 |
| 2743 | cg27127608 | EBF1 | Body | | TRUE | II | 5 |
| 2744 | cg27134730 | | | | TRUE | II | 7 |
| 2745 | cg27137084 | TMEM132C | Body | | TRUE | II | 12 |
| 2746 | cg27138281 | ME1 | TSS200 | Island | NA | I | 6 |
| 2747 | cg27140058 | BANK1; BANK1 | Body; Body | S_Shore | NA | I | 4 |
| 2748 | cg27153155 | SIM1 | Body | N_Shore | NA | II | 6 |
| 2749 | cg27198013 | RAI1 | 3′UTR | Island | TRUE | I | 17 |
| 2750 | cg27203895 | NTM | Body | | TRUE | II | 11 |
| 2751 | cg27225220 | LHX9 | Body | S_Shore | NA | II | 1 |
| 2752 | cg27228712 | | | Island | NA | II | 7 |
| 2753 | cg27252467 | LOC348021 | Body | | NA | II | 13 |
| 2754 | cg27252696 | SIM1 | TSS1500 | Island | NA | I | 6 |
| 2755 | cg27262412 | TBX15 | 5′UTR | Island | TRUE | II | 1 |
| 2756 | cg27268556 | | | N_Shore | NA | II | 1 |
| 2757 | cg27272235 | | | Island | TRUE | II | 1 |
| 2758 | cg27292588 | PTCH2 | 3′UTR | | TRUE | II | 1 |
| 2759 | cg27295832 | ANKRD34C | TSS1500 | Island | TRUE | II | 15 |
| 2760 | cg27297576 | | | N_Shore | NA | I | 12 |
| 2761 | cg27303421 | | | | TRUE | II | 6 |
| 2762 | cg27350602 | | | Island | NA | I | X |
| 2763 | cg27376707 | A2BP1; A2BP1 | 5′UTR; 5′UTR | Island | NA | I | 16 |
| 2764 | cg27401846 | | | N_Shore | TRUE | II | 11 |
| 2765 | cg27404023 | | | Island | TRUE | I | 2 |
| 2766 | cg27406678 | NKX6-1 | Body | N_Shore | NA | II | 4 |
| 2768 | cg27422141 | PCDH9; PCDH9 | 5′UTR; 5′UTR | N_Shore | NA | II | 13 |
| 2769 | cg27424370 | | | N_Shore | NA | II | X |
| 2770 | cg27425314 | DHDDS; HMGN2; DH | 3′UTR; TSS1500; 3′ | N_Shore | TRUE | I | 1 |
| | | DDS | UTR | | | | |
| 2771 | cg27452341 | CLCN1 | Body | Island | TRUE | II | 7 |
| 2772 | cg27493010 | | | Island | NA | II | 12 |
| 2773 | cg27510539 | VIPR1 | TSS1500 | Island | NA | II | 3 |
| 2774 | cg27522060 | RASL12; RASL12 | 5′UTR; 1stExon | Island | NA | I | 15 |
| 2775 | cg27527108 | | | Island | TRUE | I | 1 |
| 2776 | cg27528510 | EMID2 | TSS200 | Island | NA | I | 7 |
| 2777 | cg27531496 | | | | NA | II | 1 |
| 2778 | cg27541541 | PRL; PRL | TSS1500; 5′UTR | | NA | II | 6 |
| 2779 | cg27552679 | ISLR2; ISLR2 SLR2; I | Body; Body; Body; | Island | NA | I | 15 |
| | | SLR2 | Body | | | | |
| 2780 | cg27555582 | | | Island | NA | I | 12 |
| 2781 | cg27559661 | CPNE2 | TSS1500 | N_Shore | NA | I | 16 |
| 2782 | cg27564792 | FEZF2 | TSS1500 | S_Shore | NA | II | 3 |
| 2783 | cg27570984 | | | | NA | I | 16 |
| 2784 | cg27590397 | SSTR1; SSTR1 | 1stExon; 5′UTR | Island | NA | II | 14 |
| 2785 | cg27603915 | NELL1; NELL1 | Body; Body | S_Shore | NA | I | 11 |
| 2786 | cg27615938 | NCRNA00188; NCRN | Body; Body; Body; | S_Shore | NA | II | 17 |
| | | A00188; NCRNA0018 | Body; Body; Body; | | | | |
| | | 8; NCRNA00188; NCR | Body; Body; Body; | | | | |
| | | NA00188; NCRNA001 | Body; Body; Body; | | | | |
| | | 88; NCRNA00188; NC | Body; Body; Body; | | | | |
| | | RNA00188; NCRNA00 | Body; Body; Body; | | | | |
| | | 188; NCRNA00188; NC | Body; Body; Body; | | | | |
| | | RNA00188; NCRNA00 | Body; Body | | | | |
| | | 188; NCRNA00188; | | | | | |
| | | NCRNA00188; NCRN | | | | | |
| | | A00188; NCRNA0018 | | | | | |
| | | 8; NCRNA00188; NCR | | | | | |
| | | NA00188; SNORD65; | | | | | |
| | | NCRNA00188; NCRN | | | | | |
| | | A00188; NCRNA0018 | | | | | |
| | | 8; NCRNA00188 | | | | | |
| 2787 | cg27635135 | | | | NA | II | 7 |
| 2788 | cg27638126 | MEOX2 | Body | | NA | II | 7 |
| 2789 | cg27663389 | | | Island | NA | I | 19 |
| 2789 | cg03456213 | C9orf3 | NM_032823 | Body | chr9: 9776664 | Island | |
| | | | | | 9-97767955 | | |
| 2789 | cg18315943 | | | | chr5: 3188099 | Island | |
| | | | | | -3188375 | | |
| 2789 | cg12737160 | COL4A6; COL4A6; CO | NM_033641; NM_ | 1stExon; Body; 5′U | | | |
| | | L4A6 | 001847; NM_03364 | TR | | | |
| | | | 1 | | | | |
| 2789 | cg12098872 | | | | chr19: 477427 | Island | |
| | | | | | 25-47743151 | | |
| 2789 | cg18423852 | KCNH2; KCNH2; KCN | NM_172057; NM_ | TSS200; Body; Bod | chr7: 1506528 | Island | |
| | | H2 | 172056; NM_00023 | y | 07- | | |
| | | | 8 | | 150653080 | | |
| 2789 | cg09771468 | BARHL1 | NM_020064 | Body | chr9: 1354619 | Island | |
| | | | | | 34- | | |
| | | | | | 135462909 | | |
| 2789 | cg05733231 | | NR_024271 | Body | chr7: 4580818 | N_Shore | |
| | | | | | 3-45808745 | | |
| 2789 | cg04145287 | | | | chr1: 2655151 | Island | |
| | | | | | 7-26552194 | | |
| 2748 | cg27153155 | SIM1 | Body | N_Shore | NA | II | 6 |
| 2749 | cg27198013 | RAI1 | 3′UTR | Island | TRUE | I | 17 |
| 2750 | cg27203895 | NTM | Body | | TRUE | II | 11 |
| 2751 | cg27225220 | LHX9 | Body | S_Shore | NA | II | 1 |
| 2752 | cg27228712 | | | Island | NA | II | 7 |
| 2753 | cg27252467 | LOC348021 | Body | | NA | II | 13 |
| 2754 | cg27252696 | SIM1 | TSS1500 | Island | NA | I | 6 |
| 2755 | cg27262412 | TBX15 | 5′UTR | Island | TRUE | II | 1 |
| 2756 | cg27268556 | | | N_Shore | NA | II | 1 |
| 2757 | cg27272235 | | | Island | TRUE | II | 1 |
| 2758 | cg27292588 | PTCH2 | 3′UTR | | TRUE | II | 1 |
| 2759 | cg27295832 | ANKRD34C | TSS1500 | Island | TRUE | II | 15 |
| 2760 | cg27297576 | | | N_Shore | NA | I | 12 |
| 2761 | cg27303421 | | | | TRUE | II | 6 |
| 2762 | cg27350602 | | | Island | NA | I | X |
| 2763 | cg27376707 | A2BP1; A2BP1 | 5′UTR; 5′UTR | Island | NA | I | 16 |
| 2764 | cg27401846 | | | N_Shore | TRUE | II | 11 |
| 2765 | cg27404023 | | | Island | TRUE | I | 2 |
| 2766 | cg27406678 | NKX6-1 | Body | N_Shore | NA | II | 4 |
| 2767 | cg27418402 | PSMD6 | Body | N_Shore | NA | II | 3 |
| 2768 | cg27422141 | PCDH9; PCDH9 | 5′UTR; 5′UTR | N_Shore | NA | II | 13 |
| 2769 | cg27424370 | | | N_Shore | NA | II | X |
| 2770 | cg274253I4 | DHDDS; HMGN2; DH | 3′UTR; TSS1500; 3′ | N_Shore | TRUE | I | 1 |
| | | DDS | UTR | | | | |
| 2771 | cg27452341 | CLCN1 | Body | Island | TRUE | II | 7 |
| 2772 | cg27493010 | | | Island | NA | II | 12 |
| 2773 | cg27510539 | VIPR1 | TSS1500 | Island | NA | II | 3 |
| 2774 | cg27522060 | RASL12; RASL12 | 5′UTR; 1stExon | Island | NA | I | 15 |
| 2775 | cg27527108 | | | Island | TRUE | I | 1 |
| 2776 | cg27528510 | EMID2 | TSS200 | Island | NA | I | 7 |
| 2777 | cg27531496 | | | | NA | II | 1 |
| 2778 | cg27541541 | PRL; PRL | TSS1500; 5′UTR | | NA | II | 6 |
| 2779 | cg27552679 | ISLR2; ISLR2 SLR2; I | Body; Body; Body; | Island | NA | I | 15 |
| | | SLR2 | Body | | | | |
| 2780 | cg27555582 | | | Island | NA | I | 12 |
| 2781 | cg27559661 | CPNE2 | TSS1500 | N_Shore | NA | I | 16 |
| 2782 | cg27564792 | FEZF2 | TSS1500 | S_Shore | NA | II | 3 |
| 2783 | cg27570984 | | | | NA | I | 16 |
| 2784 | cg27590397 | SSTR1; SSTR1 | 1stExon; 5′UTR | Island | NA | II | 14 |
| 2785 | cg27603915 | NELL1; NELL1 | Body; Body | S_Shore | NA | I | 11 |
| 2786 | cg27615938 | NCRNA00188; NCRN | Body; Body; Body; | S_Shore | NA | II | 17 |
| | | A00188; NCRNA0018 | Body; Body; Body; | | | | |
| | | 8; NCRNA00188; NCR | Body; Body; Body; | | | | |
| | | NA00188; NCRNA001 | Body; Body; Body; | | | | |
| | | 88; NCRNA00188; NC | Body; Body; Body; | | | | |
| | | RNA00188; NCRNA00 | Body; Body; Body; | | | | |
| | | 188; NCRNA00188; NC | Body; Body; Body; | | | | |
| | | RNA00188; NCRNA00 | Body; Body | | | | |
| | | 188; NCRNA00188; | | | | | |
| | | NCRNA00188; NCRN | | | | | |
| | | A00188; NCRNA0018 | | | | | |
| | | 8; NCRNA00188; NCR | | | | | |
| | | NA00188; SNORD65; | | | | | |
| | | NCRNA00188; NCRN | | | | | |
| | | A00188; NCRNA0018 | | | | | |
| | | 8; NCRNA00188 | | | | | |
| 2787 | cg27635135 | | | | NA | II | 7 |
| 2788 | cg27638126 | MEOX2 | Body | | NA | II | 7 |
| 2789 | cg27663389 | | | Island | NA | I | 19 |
| 2789 | cg03456213 | C9orf3 | NM_032823 | Body | chr9: 9776664 | Island | |
| | | | | | 9-97767955 | | |
| 2789 | cg18315943 | | | | chr5: 3188099 | Island | |
| | | | | | -3188375 | | |
| 2789 | cg12737160 | COL4A6; COL4A6; CO | NM_033641; NM | 1stExon; Body; 5′U | | | |
| | | L4A6 | 001847; NM_03364 | TR | | | |
| | | | 1 | | | | |
| 2789 | cg12098872 | | | | chr19: 477427 | Island | |
| | | | | | 25-47743151 | | |
| 2789 | cg18423852 | KCNH2; KCNH2; KCN | NM_172057; | | | | |
| | | H2 | | | | | |
| NM_1 | TSS200; Bo | chr7:150652807- | Island | | | GAGGGGCT | |
| 72056; | dy; Body | 150653080 | | | | CAGGCTGC | |
| NM_ | | | | | | GGGAGCGC | |
| 000238 | | | | | | CGCTGCAG | |
| | | | | | | GAGCCTGG | |
| | | | | | | GCGGGCTG | |
| | | | | | | CG | |
| 2789 | cg09771468 | BARHL1 | NM_020064 | Body | chr9: 1354619 | Island | |
| | | | | | 34- | | |
| | | | | | 135462909 | | |
| 2789 | cg05733231 | | NR_024271 | Body | chr7: 4580818 | N_Shore | |
| | | | | | 3-45808745 | | |
| 2789 | cg04145287 | | | | chr1: 2655151 | Island | |
| | | | | | 7-26552194 | | |
| 2787 | cg27635135 | | | | NA | II | 7 |
| 2788 | cg27638126 | MEOX2 | Body | | NA | II | 7 |
| 2789 | cg27663389 | | | Island | NA | I | 19 |
| 2789 | cg03456213 | C9orf3 | NM_032823 | Body | chr9: 9776664 | Island | |
| | | | | | 9-97767955 | | |
| 2789 | cg18315943 | | | | chr5: 3188099 | Island | |
| | | | | | -3188375 | | |
| 2789 | cg12737160 | COL4A6; COL4A6; CO | NM_033641; NM_ | 1stExon; Body; 5′U | | | |
| | | L4A6 | 001847; NM_03364 | TR | | | |
| | | | 1 | | | | |
| 2789 | cg12098872 | | | | chr19: 477427 | Island | |
| | | | | | 25-47743151 | | |
| 2789 | cg18423852 | KCNH2; KCNH2; KCN | NM_172057; NM | TSS200; Body; Bod | chr7: 1506528 | Island | |
| | | H2 | 172056; NM_00023 | y | 07- | | |
| | | | 8 | | 150653080 | | |
| 2789 | cg09771468 | BARHL1 | NM_020064 | Body | chr9: 1354619 | Island | |
| | | | | | 34- | | |
| | | | | | 135462909 | | |
| 2789 | cg05733231 | | NR_024271 | Body | chr7: 4580818 | N_Shore | |
| | | | | | 3-45808745 | | |
| 2789 | cg04145287 | | | | chr1: 2655151 | Island | |
| | | | | | 7-26552194 | | |
| | | | | | SEQ ID | MAP | |
| | | | | | NO: | INFO | SourceSeq |
| | | | | | 1 | 14971 | CGGCCGCACCTCACTACCGACCTAAAGATGCGCCTTTGCTAGGCGGCAGC |
| | | | | | | 9536 | |
| | | | | | 2 | 38067 | CTTCCTATTTAGCAGGACCGCAGGGTTGGCAGACAGCAGGGCCTGGGCCG |
| | | | | | | 965 | |
| | | | | | 3 | 21984 | GCCAACCTCGTTTTTGTGGTTTCTGTCTCTTGGTGAGATCTAGGGTAACG |
| | | | | | | 8373 | |
| | | | | | 4 | 26271 | GTAATTCACCAATCACATCGTTGGACTCTTCAGCCAATGGTTTTGTTGCG |
| | | | | | | 718 | |
| | | | | | 5 | 15414 | CCTTTACTACTAAATGCTTCTCCTTTCAAAAGTCAGGGGCATGGGGATCG |
| | | | | | | 6183 | |
| | | | | | 6 | 37123 | GAGGGCACCATGGGAGCTGGCTCTCTTGCTATTCATAAAGCGGGGAGGCG |
| | | | | | | 835 | |
| | | | | | 7 | 22873 | GGGGCGCAGAGCTGGGAGGTCTGGCTCCGCGGGCGGTTGGTGGCGACCCG |
| | | | | | | 6253 | |
| | | | | | 8 | 53075 | CACTGGCACACTGAGGTAATCGAAAAGATCAAACCTATCCTCGTCGATCG |
| | | | | | | 505 | |
| | | | | | 9 | 1018 | GGCCCCTTCTTTATGCAGCCCGTTTGAAATGGTCTCTTGAGCCCAGTGCG |
| | | | | | | 40329 | |
| | | | | | 10 | 10089 | TGCCCACCCACCTGGAGTCCAGAAAGATGAGCTTCATGTCCAGGCTGGCG |
| | | | | | | 6392 | |
| | | | | | 11 | 91185 | TCTCATCGTCTCAGTGGCATTTTTCCTAGGGCTGTTCCGAGAGAACAGCG |
| | | | | | | 168 | |
| | | | | | 12 | 96888 | TGTTAGAAAATTGTGCCATCTACCCGCTATGCTGAGTACTGTCACACTCG |
| | | | | | | 959 | |
| | | | | | 13 | 57261 | CGGGTCCTAAAGGGGAGAGCTGAGCAGCCACTTCAGGGATTGCACTCCGA |
| | | | | | | 886 | |
| | | | | | 14 | 11810 | CGTGCCCAGTTGTACCCTTCCCGCGCAGCGCTCAGGAGCGACAAACCTGG |
| | | | | | | 7540 | |
| | | | | | 15 | 46306 | CGCTGGCTCTGCAGCCCAGCTCAAAAGCCCATCCTCCAGGCCACTTCCCC |
| | | | | | | 111 | |
| | | | | | 16 | 43741 | GAGTGGGGATTCTGGGGCGGGACTCTTTGAAGTCCTAGGTGACCTCTCCG |
| | | | | | | 826 | |
| | | | | | 17 | 50889 | TGTGGCGCCTGCCATTGGCCAGGGGAGGCAGACGGCGCTCTGATTGGCCG |
| | | | | | | 225 | |
| | | | | | 18 | 17267 | TTGGTGTGTGTGTGCAACACAACAATTTGTCAGCTGCTGTTCACAATGCG |
| | | | | | | 1561 | |
| | | | | | 19 | 14711 | CGGGCTGCAGGGGCCTAGCCCAACGCCGCCTCTTCACATTCACCCACCCA |
| | | | | | | 1280 | |
| | | | | | 20 | 14602 | CGGGCCAGTTTCTGGGATCTTGAAGTGTCTTTGCTGCTCCCTCTGATCAC |
| | | | | | | 3573 | |
| | | | | | 21 | 32713 | CGCCAGAATTCAGACACACAGGGGCATTTTTGGTGGAAACCACAGAAGCT |
| | | | | | | 290 | |
| | | | | | 22 | 97646 | GTCAAATGTCTTCTCGCCCTGGGCTTTTTGTTCCCTAAAATGAAACTTCG |
| | | | | | | 341 | |
| | | | | | 23 | 10849 | CGGGCCTGTGCCTCAGACTCCGCCACCCAGCCACGTTAAGGTGACTTGGG |
| | | | | | | 0371 | |
| | | | | | 24 | 60091 | CGCACGTGGGTGCACATGTGTATGTGAGTTTGAGATAGAAAAATGGGAAG |
| | | | | | | 171 | |
| | | | | | 25 | 14298 | CGCATCAAGGTTCTCTGGCACTCAGCTCATCCAGCAGTTTGTCTCCTGCC |
| | | | | | | 4613 | |
| | | | | | 26 | 13959 | GAAGTGCCTGGAGGTCCACTGATTTTCCAGGCACCCTTTCCCGAGAAGCG |
| | | | | | | 2612 | |
| | | | | | 27 | 20178 | CGGCTTAGGTCCCACTGTACAGATGGGAAAACCGAGGCCTAGAGAGGGAG |
| | | | | | | 496 | |
| | | | | | 28 | 48982 | CGCTGCCCCGGCCCCACGGCCGGTCTCACTCGACTGTGAGTACACAGCGC |
| | | | | | | 683 | |
| | | | | | 29 | 99594 | CGCTCCACCAAGGGGCACTGCTGTCAGACAGCCAGGTAGCAAGTCTGTGG |
| | | | | | | 893 | |
| | | | | | 30 | 84671 | GCAAACCTTACAGGAGTGGTTCTTACTAAAATTCACACGCAAAGTACACG |
| | | | | | | 333 | |
| | | | | | 31 | 69136 | CCTTCTGGGACTCTCTGATGGGCCACACACCGAGCAGCTGCTATTTATCG |
| | | | | | | 44 | |
| | | | | | 32 | 15663 | CGGCCCCCAGACCCTGCCTGGGACGCCCCCCAACTAACTCCCTGCTGGGA |
| | | | | | | 74 | |
| | | | | | 33 | 44332 | TGGCAGGAAATCCCCTCGCCTGGGCGCAGACGTGGGGCGTGAACGGTGCG |
| | | | | | | 653 | |
| | | | | | 34 | 10276 | ATCACAAGAGGGTCGCTGCGTGGGAAAGATCCACCTCCCTCGGGGAACCG |
| | | | | | | 375 | |
| | | | | | 35 | 13933 | CGCCCTGTCCTGCACCCAAAGGAAAGGGCTCCCCTGGCACTCTCAGAAAA |
| | | | | | | 247 | |
| | | | | | 36 | 19278 | TAAGAACAGGATTCAGACTCAAGTCTTTTTGACCACAAAGTAGTACATCG |
| | | | | | | 249 | |
| | | | | | 37 | 45286 | CGGCGGGACAGGACCTTAACCCCTGGGACGAACACCAGCTCCGCAAAGGA |
| | | | | | | 062 | |
| | | | | | 38 | 72740 | GCATTTAAGAGAATGGCAAGAAGGCATAGGGCGATCCAGGCCTCGCTCCG |
| | | | | | | 460 | |
| | | | | | 39 | 70035 | CTGCAAACAGTAAGATTAGAGACCACTGGTAGCCAATCTAATAGTCCACG |
| | | | | | | 208 | |
| | | | | | 40 | 78511 | CGCCCGCCCGCCCAGCCTCCCCCGGGATGGATCTGGAGAGAAAGAAAGTT |
| | | | | | | 600 | |
| | | | | | 41 | 56228 | AAGCTCAAGAGAAGCCCCAAGCTAAATTACCCCTGGCTCAGAAGGGTGCG |
| | | | | | | 114 | |
| | | | | | 42 | 19691 | CGGTGTAGGCTAATTTTGGAGGGAGTTCCACATTATTATCAATTTTTTTT |
| | | | | | | 654 | |
| | | | | | 43 | 96970 | CGAGCAGCATTTTTGCTGGAATGCTTGGTGTAAGATCAGTGGCATTAAAA |
| | | | | | | 381 | |
| | | | | | 44 | 11381 | CGGCTAGATTGCTAGCCTTGGCTGCTCCATTGGCCTGCCTTGCCCCTTAC |
| | | | | | | 8635 | |
| | | | | | 45 | 37673 | CGCTCTTGTTCTGGCCCCCACTCCTGCAGGCCACGCTGCGGATGGTTCAG |
| | | | | | | 597 | |
| | | | | | 46 | 24722 | AGGGCGGTGAGATCTACAGGAGAACTCAGGGCGGATGTCTGCCGGGTGCG |
| | | | | | | 944 | |
| | | | | | 47 | 13181 | CAAATTTCTCAGTCCCCAAGCAGGCCACGGGGACTGCAGCAAACAGAGCG |
| | | | | | | 2449 | |
| | | | | | 48 | 10697 | CGAACTGCTCCATGGAGCGCGCGTCTCTGCAAGCCAGGAGAAAAGACCCT |
| | | | | | | 9451 | |
| | | | | | 49 | 10139 | CGACGCCCCTTGCACTGAGCCCTCCATCCATTTTAGTGCTGGAAATGGGG |
| | | | | | | 7146 | |
| | | | | | 50 | 60285 | GGGGGGCGGGGTTCTTCGTATTAACGATTGCCCGTGGTCCTCAGCTTGCG |
| | | | | | | 691 | |
| | | | | | 51 | 10089 | CGGACATTCTTTAAGAAGGTGCTTTGTATGTCTGAGACATCACAAGCATT |
| | | | | | | 3665 | |
| | | | | | 52 | 21984 | CGAGGTTGGCGACTGTTTTATCCAGAAGGAAACTATGCCCAACAGGAACG |
| | | | | | | 8333 | |
| | | | | | 53 | 22904 | AATCGACACAGGAAGCCAGAGGAGTGGCGCGCAACCAGTGGGGAGTGTCG |
| | | | | | | 6785 | |
| | | | | | 54 | 67070 | CGGAATGCTCAAGTCTGTCACCACACAGCTGTCAGCCAAGGGAGGTGCAG |
| | | | | | | 170 | |
| | | | | | 55 | 26240 | CGCCCAGTAAGTTACGGAAAAGGCGGAGACAGAGGTTTCGTTCCCGCCCC |
| | | | | | | 505 | |
| | | | | | 56 | 79502 | TTCAACCACACAGCTTTGATTTTGTCTTTCCATTTTCAGTAATGAAGTCG |
| | | | | | | 25 | |
| | | | | | 57 | 15814 | GATCTAAAAGGATTGGTGTGGAGGCCAGAGGGCTCCGGTCCCCGCGCTCG |
| | | | | | | 4020 | |
| | | | | | 58 | 45406 | CGCTGCTATAAAAGGGGTCCCGCGCGACTTCCAAACTCAGCGCCAACCCG |
| | | | | | | 486 | |
| | | | | | 59 | 65731 | CGCCGGGGCCTCCTTAAAACACAGCGCACTCGAAGCGCAGACTGCTGCGC |
| | | | | | | 689 | |
| | | | | | 60 | 86383 | CGCAGCTCCTCACCCCGCCTGCTCCGCAGCGGGACCGCGTAGACCTCAGC |
| | | | | | | 430 | |
| | | | | | 61 | 26552 | TTGCGTTGCCCACAAGCTTGTAGTCAGAAGAACTCGCCTGGGAGGGATCG |
| | | | | | | 116 | |
| | | | | | 62 | 27528 | CGCTTAAGCTGGTAGACCCTATGAGTGTGTGGCATTAGGCATCCCCAGCC |
| | | | | | | 611 | |
| | | | | | 63 | 11178 | CGGGCGGCGCTGGTCACACCCTCGTTGCTCTCACTCAGGGCCCCCACTCC |
| | | | | | | 3348 | |
| | | | | | 64 | 24254 | CTTGAGTGAGCCCTGTGACGCCTGCTAGGTGAGGTGGCAGCCAGTGAGCG |
| | | | | | | 9864 | |
| | | | | | 65 | 22959 | ATGCCTGGCCCAAAGCAGGGGTGCAGGCAGCTTAGGGATGACGAGTGTCG |
| | | | | | | 868 | |
| | | | | | 66 | 79278 | GTCGAGGTGTCTCGCGGCTCCTAATGTGGCTGTCTGGCTGCGTCGGGACG |
| | | | | | | 012 | |
| | | | | | 67 | 76209 | TAGGCTCCTTTGTGGAGACCTGATTTGAGCACTGGTGTGAAAAAGACCCG |
| | | | | | | 541 | |
| | | | | | 68 | 15852 | CGCCCCTTCAGGCGACATAGACCCAGCTGACAACGGGACACACATGTCCC |
| | | | | | | 4270 | |
| | | | | | 69 | 40677 | CTTTCAGAATTCTCTCCTGGTGGCTCCCTCTTTCCCTTGGGAAATCTTCG |
| | | | | | | 600 | |
| | | | | | 70 | 70378 | CGTCCTCAAGCACTCAGCACAGTGGTGTGTCAAGACGGGCTGCCCAATCC |
| | | | | | | 994 | |
| | | | | | 71 | 10545 | GGGAGGACCCGGACGGGAGCAGGTTCCCTTCGCGCCTCTCTGGAGGGTCG |
| | | | | | | 9775 | |
| | | | | | 72 | 31020 | GGGAGTCGGGGGCTAAGGGCTCGAGCCAGGAGGCCCCGGAGCAGCAGCC |
| | | | | | | 754 | G |
| | | | | | 73 | 16470 | CGCACGGAGCTTGCTCTGGCCATCTCTGTCCCTGCCTGTGCCATGGACAT |
| | | | | | | 16 | |
| | | | | | 74 | 21666 | TCCACGAGGCGTTCGGACACTTTTTCCCGGCCTGACAGCAGAGAAAGTCG |
| | | | | | | 778 | |
| | | | | | 75 | 29034 | CAGGGCGGTCGAAAGAGCCTTGGGGGCACATCTCGGGGTGCGGTGACCCG |
| | | | | | | 163 | |
| | | | | | 76 | 13702 | GAGTATTCTGCTTTTAATAAGCTTCCCAATCAGCTCTCGAGTGCAAAGCG |
| | | | | | | 8535 | |
| | | | | | 77 | 18891 | CGGGGCCCCCAGGCACCCGGCCCGCACGCAAACCCTCAGCCCGGGGCCCC |
| | | | | | | 6709 | |
| | | | | | 78 | 11954 | TACAATGGCAAAATGCACTGTTGAGAACCCTTTGAAGTTGGGCAACCACG |
| | | | | | | 2475 | |
| | | | | | 79 | 45914 | GCTGGGGCGAAGATGAGTCCAGGGGTTGGGTTGAGAGCGCTGCGCAGCCG |
| | | | | | | 840 | |
| | | | | | 80 | 53030 | GGGCCTGGGTGGAAACCAGGAGGACGGATTGCCGCCTGGGGCGCTCGCCG |
| | | | | | | 043 | |
| | | | | | 81 | 13953 | GGCTTTCTGCCAGCTGGGGACACAAGATATAACTTTCATGCCCAGCTCCG |
| | | | | | | 7131 | |
| | | | | | 82 | 74025 | CGATGCCCACCAGCCTTACCGATTTAGGTAAAGGAGTAAATAAATTGGCA |
| | | | | | | 019 | |
| | | | | | 83 | 14507 | CTTGAGGATGCCTGAGGTCCACGTGACCAACTAGGATCTTCTGGCATTCG |
| | | | | | | 7291 | |
| | | | | | 84 | 10289 | GGCTTCTTCTTCTTGGGGGGCGTCCGGTTCTGATAGGGGTGACCTATACG |
| | | | | | | 3925 | |
| | | | | | 85 | 53092 | GCCACTTTCGGGGAGCGCAGAGCGCGGCGCGGGGAGGCGAGGCTGGAGCG |
| | | | | | | 233 | |
| | | | | | 86 | 33701 | CGCAGCTGCAGGGGCGCAGAGCACCCTCTATCCAAGCTGACAACCATCAG |
| | | | | | | 209 | |
| | | | | | 87 | 54357 | CGGGATGTAAAAGTGTGGAAAACTTATTTCCCACGCAGAACCCTTGGTCC |
| | | | | | | 994 | |
| | | | | | 88 | 74404 | CGAGTTGATATTTAATTAGTGAATGCACAGTTGCTTTGTGGACCTTAATA |
| | | | | | | 556 | |
| | | | | | 89 | 38066 | CGTGGGAAGAAGCACCACATTCCTGTGGTCTTGGTTGACTGCTGAAATGC |
| | | | | | | 983 | |
| | | | | | 90 | 85674 | GGCGGTAGGAACTGAAATCGATCACAGCTCGTTAGAGTACGTCACTGTCG |
| | | | | | | 694 | |
| | | | | | 91 | 52536 | GGGGTAAAAGCTCCTGGCCAGGGCTGCCTGGAGCTGCCCCTTCCACTCCG |
| | | | | | | 022 | |
| | | | | | 92 | 88583 | AACCAAGGAGACCAAAACCAGAATTCTCAAATCTAAAGTGGTTTAGGCCG |
| | | | | | | 117 | |
| | | | | | 93 | 89744 | CGGCAAATTGGGGGTGACGTTCAAGATGTACTTGATGCCGAATTCCTCCA |
| | | | | | | 471 | |
| | | | | | 94 | 42007 | CGCGTCAACTGAAATATTCAGGTTCTCACATTGGGACTGACTAGGCAAAC |
| | | | | | | 378 | |
| | | | | | 95 | 40588 | CGCCTTACCCTGTTAACCAGAACAGCCATTGCATATTCCGTTCTGGGTTA |
| | | | | | | 553 | |
| | | | | | 96 | 22954 | GTGGCAGATAAGACACGAGAGGGAGCTCTGGTCCCCGAGGGGCTGTCCCG |
| | | | | | | 3254 | |
| | | | | | 97 | 15627 | CGGCTACAGAAGCAGATTTTGAGGGTGGAATTAGAACACTTAAACACAGG |
| | | | | | | 1246 | |
| | | | | | 98 | 49309 | CGCAGCGTTTCCGGCACCCAGCCAGGCTTAAAGGTACTGTGAGGGGAACT |
| | | | | | | 445 | |
| | | | | | 99 | 15727 | CGCCCGCCAAGCAAGTAGCAGCTTCAAAGCCCTGCCCTCGCTCTCGCATG |
| | | | | | | 441 | |
| | | | | | 100 | 12788 | CCCTGAGGGGCGGGGCGGGAGCTGGCGCTAGAAATGCGCCGGGGCCTGCG |
| | | | | | | 1269 | |
| | | | | | 101 | 46236 | CGGCCTCTATGGAAGTCTGCACTCTGCTTGCTGTGGTCAGACTCCAGGGA |
| | | | | | | 351 | |
| | | | | | 102 | 10031 | GGATTTAGCGCCCCGGCTATTGGCCAGGAGGTGGCTGGGTTCAAGGACCG |
| | | | | | | 8718 | |
| | | | | | 103 | 87230 | GAGGTGCAACGGAAGCCAGAACATTCCTCCTGGAAATTCAACCTGTTTCG |
| | | | | | | 344 | |
| | | | | | 104 | 56985 | TGCCAGTGTCCAATAAAACCAGTCAGGTCTCACATATTATGTAGTTAACG |
| | | | | | | 462 | |
| | | | | | 105 | 47695 | CGAACCCTCCAACTGGGATCGGTCTGGTTCAGTGTTTGTTTTCTAAGCAG |
| | | | | | | 321 | |
| | | | | | 106 | 39694 | GGGTAGGTGCCGGCAGAGAACTTGTGCGTCTTGCCCGCCTTGCCTTGCCG |
| | | | | | | 617 | |
| | | | | | 107 | 57976 | CTCAGGTGTCTCAGGCCCACGGAGGATTTAATAGATGAAACCCTGGATCG |
| | | | | | | 915 | |
| | | | | | 108 | 17702 | CGCTTCGGTAAGGAATGAAAAGAAAAACACTTCCCAAGGCCCGGCACTTT |
| | | | | | | 9921 | |
| | | | | | 109 | 38266 | CGCAGGCAGCCGTGGACACGATCGGGTTTCCTGTGCCAGTCAATTACATG |
| | | | | | | 21 | |
| | | | | | 110 | 17513 | CGGTCAAGACACAGGAACAGCCGTACTTTCCTGCGGGTAAGAGGCTTTTC |
| | | | | | | 2871 | |
| | | | | | 111 | 27153 | CGCACCCCCGGACCAGACGCTGCTCCGCGTGTAATATTCATAAGAAACAT |
| | | | | | | 663 | |
| | | | | | 112 | 22316 | GCACGTAATTTCGCAGTCTTCTGTCCTATCCTCATGTTACAGCACCGACG |
| | | | | | | 2049 | |
| | | | | | 113 | 36994 | CGGGTCAAGCCCCACTAGAAGTTAACACCTGTGGTCTCCAAACTTGCCTA |
| | | | | | | 016 | |
| | | | | | 114 | 58357 | CGTCCAATAAGAAGAGCCCCAGCTTGACACCTGCCTATATACAGGCGAGC |
| | | | | | | 973 | |
| | | | | | 115 | 13587 | CCAGGAGAGCAGCAGCGGGAGCGCAAGGCTCCAGGGCAGAGGCATTCTCG |
| | | | | | | 976 | |
| | | | | | 116 | 36044 | CGGGCCGGTTCGAACCGCTCCCTTAACCCTTAAGCAACCAGGACGCTCCC |
| | | | | | | 860 | |
| | | | | | 117 | 36919 | CGGGAGGGCAAAAGACCACAGAGATCTGCGAAGCCAAAGTAAACAACGG |
| | | | | | | 960 | G |
| | | | | | 118 | 20716 | CCAGGGGCGCAGCGGTGTGCGCATAGTAGGGTGGGAACCCGATGGCAACG |
| | | | | | | 638 | |
| | | | | | 119 | 40573 | CGCCCCCACCCCCCGGCTCCGCCCGGGGCCACTTGTTGCTTTCTTTGCAG |
| | | | | | | 764 | |
| | | | | | 120 | 50373 | CTGAAGCATCACTCACAACTCCACTTTCTTTACTTAAATAAGGATTTCCG |
| | | | | | | 735 | |
| | | | | | 121 | 40138 | CGCAATCCCCAATCCGCTGCAGCCCACAAACCCAGAGAGCCAGAGAGCCC |
| | | | | | | 052 | |
| | | | | | 122 | 28388 | CACACGGGGACGGAGCTGGGCTGGCAGCGGTGCCCAGGACAGAGTGGGCG |
| | | | | | | 05 | |
| | | | | | 123 | 11067 | CGCGCACGATAGTCCCAACGCGGGCCTGTCTCACCTGGACTTCCTTCCCG |
| | | | | | | 3082 | |
| | | | | | 124 | 53286 | CTGTGAATTCCACCCACCGGGCATGGGAAAGTGCGGCATTCCCAGTCCCG |
| | | | | | | 921 | |
| | | | | | 125 | 41011 | CTGTTGGCTTCTTATCACTGACAGCGGAGAAAGACTGATGGGCCTTGGCG |
| | | | | | | 32 | |
| | | | | | 126 | 49519 | CGAGCTACTCATTAGAGTTTAATTTCCTCGAGCCAAGTCCCTGGAGACGG |
| | | | | | | 250 | |
| | | | | | 127 | 14511 | CTGGAGTCCCACAGGAGCTCTTCAGCTGGTAGCCCTGGAAAAACTGGACG |
| | | | | | | 4994 | |
| | | | | | 128 | 15759 | CGGCTACCTGGAGGGCCTCCTGCCACCGGCCCGCAGCCTGGTAGAACTTG |
| | | | | | | 79 | |
| | | | | | 129 | 13162 | GAGGCTGCACTCACGAGGTCCGAGTGGAAGGGCTTCGCGTTGGAGGTGCG |
| | | | | | | 2739 | |
| | | | | | 130 | 57504 | CGGGCACTTCCAGGCCCCATAGGTCTGTAGCTCTGTCCAGCGAGTTCAAG |
| | | | | | | 948 | |
| | | | | | 131 | 23360 | GAGGATGACCCTGTATTCCTGGGTTAGTCAAGGTCAGCTTGCCAGAGACG |
| | | | | | | 34 | |
| | | | | | 132 | 76137 | GTAGAGAGTAACCAGCACCAGCTTCACAGGAATGGCATGACCTTGATACG |
| | | | | | | 0 | |
| | | | | | 133 | 22094 | TTAAACTTCATTAGACACTGAAACTTGGAATATGATTCCATGATTCTCCG |
| | | | | | | 461 | |
| | | | | | 134 | 17073 | CTATTTCACTTAACGCCGCTTTTATTTCGTTTTCGTTCCAATAATGCTCG |
| | | | | | | 9179 | |
| | | | | | 135 | 77591 | GTAATTTAATTTTCTCTCCCGAAAGCGTTGCTAATTAAATCCTTTCTCCG |
| | | | | | | 726 | |
| | | | | | 136 | 50690 | CGCCTCCATGCAGCCACGACCACCGCCCTGAGCCGGCCGCAGCGCCACCT |
| | | | | | | 152 | |
| | | | | | 137 | 19558 | CGCGGCTTGGGTTTCAACGCACTTTGGCGCCTGACAGAGTCGCATCTCCT |
| | | | | | | 808 | |
| | | | | | 138 | 45949 | CGCCCGGCCTGTAGCTCCCCCCACGGCCCAGACGCAGGGAACTCCCCTCC |
| | | | | | | 828 | |
| | | | | | 139 | 16097 | CGCTGACTCAGGAGACTTCGGAGTGTAGGCTGTCTAGTTCAGTGGTTAGG |
| | | | | | | 5792 | |
| | | | | | 140 | 13928 | AGGCCAGACCTGCAGGCATGAGAGGCACAGGCAACCCGCCTGTACGGCCG |
| | | | | | | 4498 | |
| | | | | | 141 | 10289 | AGGCCTCCTGCTGCAACTGCAGGAGGATGCGGTTCGCTTGCTGCCTCTCG |
| | | | | | | 6475 | |
| | | | | | 142 | 89954 | GCACTGCACCAATTCACACATGGATACAGACTTCCAACAAATGACTATCG |
| | | | | | | 679 | |
| | | | | | 143 | 21022 | CCTGTCCACCTGGAAGGCTGCCCGCTCTCCCTGAGGGTCCTGGGAAGGCG |
| | | | | | | 844 | |
| | | | | | 144 | 61733 | CGTCACAGCTACCTGTCTCTGGGGATCCCTAGTATAACACATTCAGTGTT |
| | | | | | | 046 | |
| | | | | | 145 | 25090 | AAGTGGGGGGCAGGGGCTGTGCGCGGCTCTCTCCCCTAAAGCGAGGTTCG |
| | | | | | | 298 | |
| | | | | | 146 | 55488 | TTGGGGGCTGGGTCACGGGATGAACCGGGGGGTGGGTCACGGGATGAACG |
| | | | | | | 6 | |
| | | | | | 147 | 13205 | CCAGGCGACTGGGAGAAATTTGGAGACCTGTCAGAGTGGTCAGACACCCG |
| | | | | | | 3823 | |
| | | | | | 148 | 10091 | CGGGTAAATCGGCAGCGAGACAGCCCCCTGCAAATAATGCTGGCATTCCC |
| | | | | | | 1949 | |
| | | | | | 149 | 26172 | TGGGCGTAACGGGGCGGCGGCGTAACGTGTGGCTCTGTGGTTAGGGCACG |
| | | | | | | 185 | |
| | | | | | 150 | 15094 | CGCCCCAGTGAGGGTGATCGTATTCTCCTAAGGAGAGCTTTATTGCTGGG |
| | | | | | | 9495 | |
| | | | | | 151 | 36132 | CGGCCAGATTCCCCCACCCGCCCCCAGCGTCAGCTGACGTCACAATCGGC |
| | | | | | | 627 | |
| | | | | | 152 | 13622 | CTGATGGGGGTCCACTGGGACTTACATTTACACAGAGCTCGCTGGTACCG |
| | | | | | | 4666 | |
| | | | | | 153 | 33700 | CGGCAGAGTTCGCGGGCTTAGCAGACCCGCCCATTGGCTCTTGCATCTCC |
| | | | | | | 757 | |
| | | | | | 154 | 62304 | TCTTTATAAAGGGCCGCCTTGGGGCGCGAAAAGTTCGTGAGGTGTAGTCG |
| | | | | | | 554 | |
| | | | | | 155 | 10003 | CGCAAGGGGGCTGAAGAGCCAAATGGGGAAACTGATGGAGCCTCACAAGT |
| | | | | | | 9476 | |
| | | | | | 156 | 16206 | CGCCTGTCGACGAGATGCTATTAACCAGTTTTTGCTCTGCCCCTGTCATG |
| | | | | | | 8382 | |
| | | | | | 157 | 36919 | TTTTACTCTTTACAATACATTCTTTCATGCTTCCTAGGGATTGAGCTGCG |
| | | | | | | 819 | |
| | | | | | 158 | 97176 | CGTGCAGACAACAGAATGGGGATGGAATCTCCTTGTGGCCCCCAGCTCAG |
| | | | | | | 7 | |
| | | | | | 159 | 23165 | CGCTGGCGTGCAACACAGGCACTGACTCACACTTTGTCTAAACAAGCTTG |
| | | | | | | 8979 | |
| | | | | | 160 | 16228 | TGCGGTCGGTGGGGCGCAGGGCCGGGGAGCCAGGGGGGTGCCGGGGCTCG |
| | | | | | | 3705 | |
| | | | | | 161 | 12645 | CGTGGTTGCTCGACTGTTGTATCTGTGATACATTATCCGACTAAGGACTC |
| | | | | | | 0465 | |
| | | | | | 162 | 10005 | GAGCTTCTTTGAAGACCCTCCTCAGATAAACTGCTGAGTTGCAGGTGTCG |
| | | | | | | 3305 | |
| | | | | | 163 | 11954 | CGTGGCGGTCCCCTTGCTCATCTGACTCCGGAGGCAGGTTCCGCAGAAAG |
| | | | | | | 3336 | |
| | | | | | 164 | 40120 | GGACACAGTGGCCACGCTGCTAGAGTGCAAGACGCTCTTCATCTTGCGCG |
| | | | | | | 250 | |
| | | | | | 165 | 57347 | CGCCCTTGTTGACTTTCAAAAGGCGCCGCCGGCCCCGCGCCCTACACGCT |
| | | | | | | 16 | |
| | | | | | 166 | 21489 | TCCACGGGCTCCATGCTGGATTCCATATGGCCAGCTGGGCCGAGGGAGCG |
| | | | | | | 196 | |
| | | | | | 167 | 39755 | CGCCCAGCCCTTGCGCCCCCCGGTACACTGGCCCCGCCGGGTTCCCACAC |
| | | | | | | 181 | |
| | | | | | 168 | 73847 | CGCGCCCTTCTGCACGGGGACCCCAGCCCACCCCCGTACGGACACGCCTT |
| | | | | | | 259 | |
| | | | | | 169 | 74035 | CGCAGGCCAGCAAGCTTCTGAAAAGCAAACCTAGGAAGTAGCTTTCCAAC |
| | | | | | | 742 | |
| | | | | | 170 | 29632 | TCGTCCAGTTGACTCCAAGCTTGATAACGCGTGTAGGGGCCGTGAGGCCG |
| | | | | | | 64 | |
| | | | | | 171 | 25129 | CGCCCCCAGGGCCCGGCGTCCTGGGCCTCTGACTCTGCCCGGTTTGCTAA |
| | | | | | | 184 | |
| | | | | | 172 | 32595 | CGAGAGAATGAGTAGCCTGAGCAAAGTCATAGGGGTAAGATAAAACGACA |
| | | | | | | 801 | |
| | | | | | 173 | 64937 | ACAGAAAAACTGCCCGCAGCTAGTAAGGAATCCTGATGATGTTACTCACG |
| | | | | | | 528 | |
| | | | | | 174 | 95235 | CGTGGGCACGCTGTCGCGCACCGAGCTGCAGCTTCTCAACCAGCTGCACT |
| | | | | | | 489 | |
| | | | | | 175 | 38892 | CGGTGGCTATCAGACGAAGAATGGGAAAATACAGATAGCAGACTTACAGT |
| | | | | | | 901 | |
| | | | | | 176 | 10333 | AATGCGCCCTGACTCCCCCTGGCCGAGAGCCGGCTCAGAATGAAAGAGCG |
| | | | | | | 766 | |
| | | | | | 177 | 26271 | TGGAAAATCTGATTGGATGAATCACTTCATTTTTGAATCCTCTCTTCTCG |
| | | | | | | 816 | |
| | | | | | 178 | 11410 | CGGGATAAGGTTAGCTCGTTTATCCAACAAATATTTGCAGAGCCCCTACT |
| | | | | | | 9526 | |
| | | | | | 179 | 31820 | CGGACTAAGTGGGCCAGACTCTTGTCAGGGGAGGGATCACCAGGACCTCA |
| | | | | | | 572 | |
| | | | | | 180 | 74810 | AGGCTACCAGGAGCAGGAGCAGCAGCGCCGCCCGCAGTAGCCGGGGAGC |
| | | | | | | 017 | G |
| | | | | | 181 | 50227 | TAGATGAGGCCCGGCGGGTTCCTCCCCTCAGGCTAGGCGGGGTGGCAGCG |
| | | | | | | 199 | |
| | | | | | 182 | 10184 | TCTGAGGGAATACCCGCAGCAGCGCTACCAGAGCGCATTTGCTCTATGCG |
| | | | | | | 1008 | |
| | | | | | 183 | 73101 | AACTTACAGTCTTCAGGGAAGGGCTTCCTGCCAACTGGAACAGTGGTGCG |
| | | | | | | 264 | |
| | | | | | 184 | 67990 | CGGCCTCCACCCGCCACAAGCGCACAGGGCTCTGCCCACTCCCCGCCCCT |
| | | | | | | 0 | |
| | | | | | 185 | 70682 | ACCTGGGCGTGGGGACACCACCAGGCAGGAGCAGAGGCAGGACTGGGAC |
| | | | | | | 098 | G |
| | | | | | 186 | 53097 | AGGGCGCCGGCAGGCGGCTGAGGCAGAACGGTTGGGCTGCGGTGCCTCCG |
| | | | | | | 777 | |
| | | | | | 187 | 19754 | CGGAGCCGCTGCACCACCACCCCTACAAATATCCGGCCGCCGCCTACGAC |
| | | | | | | 125 | |
| | | | | | 188 | 12934 | CGGAAGTGACCAAGCGCGACTAGATCTAAAGCCTTCCCGACTTCCATTTT |
| | | | | | | 6694 | |
| | | | | | 189 | 62070 | CGGACACCCAGAGCCCAGCGCGCCCGCCCTGCGTCTCCGCACCAAGCCCT |
| | | | | | | 184 | |
| | | | | | 190 | 28603 | CGCGGACTCCTTGTCCTTGCCGGTTCACCTCCCTGTGGAGGACCTCCTCT |
| | | | | | | 292 | |
| | | | | | 191 | 10139 | CGAGCCAGGTCAGTGGGCACTGTTGCTAGGTCCTCTATCATGTTCCTGGG |
| | | | | | | 5217 | |
| | | | | | 192 | 32223 | TGAAATCTTGCGGTGTTGAGTAGGACCGCCAGGCCGGCAAGCAGGAGGCG |
| | | | | | | 076 | |
| | | | | | 193 | 13702 | CGAGAGCTGATTGGGAAGCTTATTAAAAGCAGAATACTCCAGGGGCAGTC |
| | | | | | | 8546 | |
| | | | | | 194 | 36728 | ATTAGGTGCCTTCGGCGTGGGCCGGCCCCCACTCCAAAATCAGGCTGGCG |
| | | | | | | 693 | |
| | | | | | 195 | 70151 | CGCCAGGCTTGCTAGTGAGGATGGGACGCAGTCTCAGGCCCCACGCAATC |
| | | | | | | 160 | |
| | | | | | 196 | 96463 | CGCCGCGCGCGCTCTCTGCCCATCTCCGGCTTCGCTGAAGCTGCTACAGC |
| | | | | | | 902 | |
| | | | | | 197 | 96626 | CGGTCATCAACTGAAATAGGCAAAACCAATAACGCACCTCGCTTTTCGCC |
| | | | | | | 788 | |
| | | | | | 198 | 10675 | TAAGGTGTCTTCCTACAGACACCGCTGCTGCTACCTTGCTACCTTCAGCG |
| | | | | | | 0146 | |
| | | | | | 199 | 13169 | GGCGTCTTCTGCGCATTTGTTGAAGTTACAGAGCCCTCGTCATGATCCCG |
| | | | | | | 4034 | |
| | | | | | 200 | 62583 | TGGGAGGCTGGGGCTGGGCGAGACTCGCGGGCCCGGGTAGGTGAGCCTCG |
| | | | | | | 795 | |
| | | | | | 201 | 18254 | CGTGGTTCCAGGCTCTTGGCTGGACCGGGAAGACCATATGGCGCATGCCG |
| | | | | | | 5485 | |
| | | | | | 202 | 89954 | CGGTGCTGTGGCATAATTACCGTGCTCGTTGACTTATAGTCTCATGATTT |
| | | | | | | 258 | |
| | | | | | 203 | 63026 | CGCTCTTTGTAAATACAGAATAGGACAAAACGGAAAGAGTGATGTGCTGT |
| | | | | | | 212 | |
| | | | | | 204 | 13356 | CGCCGCACAGCAACCCGAACTTTCGTTTGGTAGCACTTGAAAGAGTTTTC |
| | | | | | | 3764 | |
| | | | | | 205 | 27637 | AACCACAAACCTGGTAGTCCAAATGTGTTGGGCTGTGGCCAAGTTGAACG |
| | | | | | | 395 | |
| | | | | | 206 | 29974 | CGCGCCCGCGTCTTCATCCTCAGACTCACGGCGTCACTGTCGACCCGCAC |
| | | | | | | 723 | |
| | | | | | 207 | 21022 | CGCAGAGCCCCTGTTGCCCTGGGCCAGATGGCCCGTAGCAGCAAAAATAA |
| | | | | | | 699 | |
| | | | | | 208 | 34530 | CGCCCCACAAGCAAAAGTAATTCCCAACCAAGCATGCGCAGTGCTCAGGG |
| | | | | | | 799 | |
| | | | | | 209 | 79234 | CGCAGTATGACTTCAAGAAGCAGCCTCATGGTTAAGAGAAAGGGGTTCTG |
| | | | | | | 251 | |
| | | | | | 210 | 62304 | CGCGGCCGTCAGGCAGTCAGGGCACCCACCCACTGTCCGACTCCACTCAC |
| | | | | | | 779 | |
| | | | | | 211 | 48050 | CGCGTGGAGCGTTTCAACCCCCACGTTCACCGCGCCAGGTGATACAAGAC |
| | | | | | | 274 | |
| | | | | | 212 | 96463 | CTGCCCCTTGGAGCTGTTGCCTGGGCAGGGGTGGCCTTGGTTGTTTACCG |
| | | | | | | 185 | |
| | | | | | 213 | 22316 | AAGGTCGAAGAGTCGTTACCAAAACCTTTGAAGCCGCTTTTCGGCTCTCG |
| | | | | | | 9965 | |
| | | | | | 214 | 10270 | TCGTGGAGCACGGCGCTTGTGTAGGGCAGAGCCTGCTGGTCCTCCAGCCG |
| | | | | | | 33 | |
| | | | | | 215 | 93074 | CGCCCAGCACCCTGCCTCCGGCGATGCCGCCCCAGCCCCTCTGATGGCCC |
| | | | | | | 929 | |
| | | | | | 216 | 19692 | GAGCGCATACCAAAGGCAGACTCCTTTGCAGGCTCCACGAGCCCCATTCG |
| | | | | | | 217 | |
| | | | | | 217 | 17702 | CGGTGGTCAGCCAGCTCCCTGCATTGTTCCGGTAGCGAGCTCCACACACA |
| | | | | | | 6301 | |
| | | | | | 218 | 54430 | CGCCCCACAGCTGGCTCCCGCGCTCTGCCCACCGCCACGCCACCTTCACC |
| | | | | | | 382 | |
| | | | | | 219 | 76101 | CGCTGACCCACCGCAGCCCGCACTGTTTTGCGAACAGTTCGCAAGGACTG |
| | | | | | | 114 | |
| | | | | | 220 | 31938 | CTGCCTCTCAGGGGTCCAGGCTGGCTGGCAGAGGCCATAGTGACGTGGCG |
| | | | | | | 886 | |
| | | | | | 221 | 97000 | CGGTCCAGGTGGGGAAGAACTGATGCAGAAATGCTATGTATACATTAAAT |
| | | | | | | 811 | (This probe can belong to Red or Green) |
| | | | | | 222 | 10090 | CGGCCACTGTCCCTGAAGGGCAAGCAGTCGTCTAAACCTTAGGTCCAGAT |
| | | | | | | 6383 | |
| | | | | | 223 | 12568 | CGCGTGTCTGATACTTGGGATCCTGGCTTGCGGGCCCTCCTAGACTCTGC |
| | | | | | | 7041 | |
| | | | | | 224 | 12920 | CGCCCTGTCCCCTGGCCTTGGCTTGTGAGCTGAGCGAGCAGCAGCTGCTG |
| | | | | | | 4339 | |
| | | | | | 225 | 22959 | CCGAGCTGGTGGTAAATTGCATCTCTCGACAGAGGTGGCTGAGGGAAGCG |
| | | | | | | 525 | |
| | | | | | 226 | 10485 | CGGAACGTTCTACCTGTTGGGCTTCGCAGCCGAGCTGCTCACCCCCGGCC |
| | | | | | | 2355 | |
| | | | | | 227 | 14604 | CATTGCATCAAGCCTTGAGTGTGCATGATAAGCAGGATGTATGCCCTTCG |
| | | | | | | 4461 | |
| | | | | | 228 | 12265 | TCTATATATACTCAGGCCTCCAGTTGGGGGAAGCCCTTGGTGGCCAATCG |
| | | | | | | 1486 | |
| | | | | | 229 | 37389 | CAAGATTCTGGGGACTCAGTCACTCCAGGCTGTGGGGTCTGGAGTGGTCG |
| | | | | | | 951 | |
| | | | | | 230 | 18546 | CGGCAAAGGCGCTGCTGCCTCAAGCTTGCTTTACATGCCTCTCTAGTTCC |
| | | | | | | 2493 | |
| | | | | | 231 | 14391 | CGGAGCCCCGCAGTGTGCGTGCCCGCCGCCTCCAGCCATCTGAGCCTCCC |
| | | | | | | 6273 | |
| | | | | | 232 | 10089 | AATGTCCTTGAACGTCATTAGCAGGTTTCAGGGACCTACTTCGCTATTCG |
| | | | | | | 6803 | |
| | | | | | 233 | 60032 | CGGACAGTTGCCCACTCACAGCGTGCAAAGGGGTCGCACTCCCTGTGGGT |
| | | | | | | 607 | |
| | | | | | 234 | 17275 | TCTCCGACGACAGCTAGTTTCTATAGTAATGTGGGGTGCGGGGATTCCCG |
| | | | | | | 1331 | |
| | | | | | 235 | 10128 | TGGAAAGCCCTGTGACCTATTCCCAGGGACCCAGCAGTGGGCTCCCAGCG |
| | | | | | | 2726 | |
| | | | | | 236 | 13959 | CCCACAGAGTATTCAGGTGTTAATCACCAGCTCTCTTTTCCCTATGTGCG |
| | | | | | | 2127 | |
| | | | | | 237 | 10374 | CTGCTGGAGGGCCCAGCCCCTGGGGCCTCGGGGTCGTTCGGGTCCTGACG |
| | | | | | | 0476 | |
| | | | | | 238 | 15162 | GAGCAGGGCAAGTGACCCATGTGTTTGCCTCTTCTACCTAGGAGATGACG |
| | | | | | | 623 | |
| | | | | | 239 | 13922 | GTGCCGCAGTAACGGCTGCTGCTCGGCCAGGCGGTAACTGATGGGCGCCG |
| | | | | | | 8153 | |
| | | | | | 240 | 10632 | TGGAAGCGAGTCCCATACCAGGGCTCACACCCTGGAAGGGGCTGGTTCCG |
| | | | | | | 861 | |
| | | | | | 241 | 11708 | CGCCCTCAAGCCGACTCCCGGGCCGGCCCCTCGCTGCCCTCCCGCAACCT |
| | | | | | | 6479 | |
| | | | | | 242 | 74734 | CCTCGCCCTTCAGAGTAACTCCTGTGGACTCTGAGACTCTGGGATATTCG |
| | | | | | | 874 | |
| | | | | | 243 | 70151 | CGCAATCCTTTTGCAAAGCCAAGAAGTGTGTGTGTTGTGTGTGTGTGTGT |
| | | | | | | 117 | |
| | | | | | 244 | 14937 | GGAAGAAGATCCTGCCGGAGTCTTTCTTTAAGGAGCCTGATTCGGGCTCG |
| | | | | | | 4914 | |
| | | | | | 245 | 20687 | CGCGCCAGTCAACTCCGCGCACGTTGCCCCTGCTTGGCAGCCAATAAAAG |
| | | | | | | 681 | |
| | | | | | 246 | 12285 | CGAGCAGGCTTGGAGACTCTGCCTGCGTCCTCCACTTCGTCCCGGCCCTT |
| | | | | | | 2454 | |
| | | | | | 247 | 59529 | CGCGGTGGAGGAGCCGGCGGCTCGCGTGGGGCTCGGGATCTTGGGGACCG |
| | | | | | | 618 | |
| | | | | | 248 | 57276 | ATCCATCCAAACGACCCCAACCAAATCTGGGGGCCAAAACGCAAAGATCG |
| | | | | | | 527 | |
| | | | | | 249 | 22317 | CGCCCGCAAAGACGCCGCATTCCAAATGCAGAGCAGATCGGCTGTAACAG |
| | | | | | | 6167 | |
| | | | | | 250 | 83636 | CGCCCGCCGGTAGGAAGGAAAGAAAGCAAAGCACATGCAAATTGACCGAC |
| | | | | | | 325 | |
| | | | | | 251 | 22316 | GACGGCACGGTGTTTCGATCACAGACCGCGTCCTTGAGTAATTTGTCTCG |
| | | | | | | 0297 | |
| | | | | | 252 | 10844 | CTATTATCACTCACTACATTTCCCAGCTATGTACTGAAAAAATCAGCTCG |
| | | | | | | 0118 | |
| | | | | | 253 | 56424 | CGGAGGCTGTACAGTCATGCTAATGAGCTGCTGGACAATGGCAGTTTTTG |
| | | | | | | 872 | |
| | | | | | 254 | 20145 | CGGAGAAAGCCTTGATTAAGATCCAACGTTCCTGAGCTCTTTGCCAGGAA |
| | | | | | | 0690 | |
| | | | | | 255 | 12644 | CGCCTGGGGTGGAGGGTATGAGGCAAAGCCCCAAATAGTATTCATAATGC |
| | | | | | | 8033 | |
| | | | | | 256 | 98196 | GAGGACTGTCCATGAGCGTACGCAGCTGCTCCGGGTTTTCGTGGCAGCCG |
| | | | | | | 97 | |
| | | | | | 257 | 10635 | CGGCACTCTCGATGGAGTTCCATTTTGTTGCAGTGGTGCTTCAGCTTAGA |
| | | | | | | 9455 | |
| | | | | | 258 | 19183 | CGGACCACAGCTCCTTGTCCCAGGGCCACAGTGGTGTTCATTCAGTGCCT |
| | | | | | | 732 | |
| | | | | | 259 | 15779 | CGGCCTCATCTTCGCCCAGCCAACCCCGCCTGGAGCCCTATGGCCAACTG |
| | | | | | | 999 | |
| | | | | | 260 | 72897 | AGGATCTGGAGCCAAGTAATGGTGATACTGATGCTTCCTTTTCTTTGCCG |
| | | | | | | 565 | |
| | | | | | 261 | 26273 | GGAGCCCTTCTTCGGGGCGGGAGCTGACTTAGCTGGTTCAGGCATGTTCG |
| | | | | | | 199 | |
| | | | | | 262 | 39523 | GAGGGGCGTGGGGAGCTTGCGGCACAGCTAGGGCATCCCGGCGAGGAGCG |
| | | | | | | 158 | |
| | | | | | 263 | 13414 | CGCCCCGCGTGGCAGAAAGGAGTTCCTCAGCTGCTGTATCTGGTGGGAAA |
| | | | | | | 4055 | |
| | | | | | 264 | 89438 | GGGGCTGTGTGCGGGCCGGGTTCCTCCCTTACCGCTTTGGGTGCCCTGCG |
| | | | | | | 611 | |
| | | | | | 265 | 29293 | ATTCGGATTCAGAAATGCTTTGCAACTCCAGAGCTGTTGAGCCTGCGGCG |
| | | | | | | 325 | |
| | | | | | 266 | 57264 | CTCATTCTGGTTGTTTTCCACCGCGTCTGCTCCCATTTGCGTGGGATGCG |
| | | | | | | 095 | |
| | | | | | 267 | 51487 | AAATTGTGAAATGTTTCCTTTCTGTTTCAAAATAGGCACGACCCACTTCG |
| | | | | | | 529 | |
| | | | | | 268 | 85640 | GGTCCTCTCTTAGGGGCGCGCCGTCTCCTGGCTTCCTGTAAGAAAAGGCG |
| | | | | | | 943 | |
| | | | | | 269 | 38585 | CGCTGGCCCTGTCTGGAATTTAAAGCTCCGTCTGAATTCTGGTGCCTTTT |
| | | | | | | 881 | |
| | | | | | 270 | 13023 | GTGACGGAAGCGGGACTGGAGACATTATGAAGGCTGTTACTGCTCCACCG |
| | | | | | | 5850 | |
| | | | | | 271 | 21653 | TTCTGACAAATCTCTTTGGAATCCTCACTTCATTCAAAGATTCAAGCTCG |
| | | | | | | 473 | |
| | | | | | 272 | 51183 | GGAGGACACCTGGAATCCCTCCTTGCTCCTAAAGGTGTTTCACGGTACCG |
| | | | | | | 988 | |
| | | | | | 273 | 85996 | CGGACCAGACCCAGCCCTCGGAGTCTATTTTTTGCCTCCAGTTACCGGAT |
| | | | | | | 202 | |
| | | | | | 274 | 10335 | CGCCGCACAAGCCCCGGCTTTGTGTTGCTAAGCGATTAGAGCAGATGTAA |
| | | | | | | 5958 | |
| | | | | | 275 | 84140 | CGGATGATCTCCTGCCATGACTCAGCGCTTCTCGCAGGCTGCCCTGCTGG |
| | | | | | | 923 | |
| | | | | | 276 | 37084 | CTGTTAGCCGTTCACCTCGTGCCCGCAGACTTCTCAAAAAATACAAATCG |
| | | | | | | 662 | |
| | | | | | 277 | 37893 | AGTTAGATCTGCAGTTCACCTTAATTTTGGCAGCTCACTGTATCATAACG |
| | | | | | | 981 | |
| | | | | | 278 | 10823 | CGGACCTAGTGAGCCAGGCAGAGCCTTTAGGCCCACGCCTGGGCACCACA |
| | | | | | | 7572 | |
| | | | | | 279 | 10102 | CCCACTTCTTATGCTCTACAAAACAACAGCAGTAGGGGAGTGACTGCACG |
| | | | | | | 278 | |
| | | | | | 280 | 12490 | CGCCAGCTCTCCCTGGGACCAAGCGGTTGGCAAGCGCCTGCAGCCTTGGT |
| | | | | | | 9028 | |
| | | | | | 281 | 15262 | ACAGAAGGCATTTTGGGCTAAGGACGCTCACAACCCGGTTTCCTGTCCCG |
| | | | | | | 2368 | |
| | | | | | 282 | 37673 | TGGCGCCCCCTGTAGTTTATGCCACGCAGCGGTCGCGGGTGTGCTGAACG |
| | | | | | | 335 | |
| | | | | | 283 | 13356 | TTCCGGGGGCTGCCCCACAGAAGCAGGTGGGGATCGACAGTGGCTCTCCG |
| | | | | | | 2101 | |
| | | | | | 284 | 74024 | CGAACGGTGAATCTGCTATGGTAGGGACGGCGCGGACCTTGGAGCCATCG |
| | | | | | | 628 | |
| | | | | | | 42075 | GATGCTGAGCTGAGTTGATTCCCAAATATAAATGTTCTTTTCAGAATCCG |
| | | | | | 285 | 554 | |
| | | | | | | 10335 | CGGCTTTCCGCTTGGCTGGAGACACGCAAACTGAATCTGCAAGTAATGCA |
| | | | | | 286 | 5190 | |
| | | | | | | 20359 | CGGCGGGTTAGGAACTCGCTGGCGTCAGGCTGATTCCAAGGCCCCCAAAC |
| | | | | | 287 | 9089 | |
| | | | | | | 17610 | CGCTCCCCTCGCCCTGCAGCTCGGCTGAGACGCCTCCCTGAGACACCGCC |
| | | | | | 288 | 7427 | |
| | | | | | | 85417 | CGCTTCCCTAACCTGTGTCCAGGCAACAAAGGGGTCCTTGTTTTTGCACA |
| | | | | | 289 | 416 | |
| | | | | | | 17271 | TAGACCCAGGACGGTCTTGTAGGCTCAATGTGTGTGTTTCATCCCAGGCG |
| | | | | | 290 | 322 | |
| | | | | | 291 | 86383 | CGCACTCTCCCAACATTCGGGGAAGGGCGTGCCTTCAGGATTTGGAGTAG |
| | | | | | | 696 | |
| | | | | | 292 | 70945 | ATGAATGGATGCTCCTCCCAGGTGGCACCCAGAGCCTGGCCCCATCCACG |
| | | | | | | 457 | |
| | | | | | 293 | 12953 | CGGACGCACTGCAGAGACGTCCCTGTTTTCGGCGCGTCCTCCGACACCCA |
| | | | | | | 4613 | |
| | | | | | 294 | 33787 | GCGCGGGGCAGTCAGAGTCCCCCTACTTGAGCGGGTTGTGGCGGAGAGCG |
| | | | | | | 739 | |
| | | | | | 7 | 15436 | CGGTGCATCTTACTGAGAACATGTTATTATGCTTTATTCTCGGTACTGAA |
| | | | | | | 3173 | |
| | | | | | 296 | 55382 | TTAGCTGCTGGTGCGGGGCAGGCCTGGGGCAGCGCGGGGCGAGGAAGGCG |
| | | | | | | 901 | |
| | | | | | 297 | 48396 | AGCGTGGAAGGCGGCGGGCTCAGGCGGGCTTTCCGGTCATTAGCGCAGCG |
| | | | | | | 670 | |
| | | | | | 298 | 14022 | TGTTCAAAGTCTTTTCTCTGACAGCATCTGTCTCTAAAGGCCGAACAACG |
| | | | | | | 0810 | |
| | | | | | 299 | 12589 | CGGCTTGGCGAGGGTCTCCTCTGACCCACTTAGCCTTGCCAGCGCTCAGA |
| | | | | | | 9754 | |
| | | | | | 300 | 26250 | AGTACCAGGCCTGTAGCGGTGGGGCTTCTTCACGCCACCGGTGGCTGGCG |
| | | | | | | 744 | |
| | | | | | 301 | 53685 | GGTCAAAAATCCCAGCATCCTTCTGTACCTCTCAAAAGCCCTGTTTTTCG |
| | | | | | | 388 | |
| | | | | | 302 | 11653 | CCCCGCGGTGGGTGTGTGAAAGTCAGGGTGGCAGTGACGCGGCGCCTGCG |
| | | | | | | 278 | |
| | | | | | 303 | 18338 | GCAACTCTGATCCAAATATTTAACTGTGAGTTATAAATCCAGACATCACG |
| | | | | | | 2726 | |
| | | | | | 304 | 14709 | GGCGCGCCTGGGCCAGGCCGAGAACAATGCACGTATTAGGATATCAGCCG |
| | | | | | | 8585 | |
| | | | | | 305 | 38965 | GGAACATGGTGCGGCTTCGGGGCTGCCAGCGGGAAGCCGTTGGGAAGTCG |
| | | | | | | 252 | |
| | | | | | 306 | 12194 | CGCGAAAATCAGTTCCGCCTCTGCCCCAAGAGCCAAGAGGGGTGGAAAGG |
| | | | | | | 6608 | |
| | | | | | 307 | 15468 | CGAGGCCGCTGCTGGGGAGGACGCTGGCCAGCGTGCAGGGGGCGGAGGCG |
| | | | | | | 1197 | |
| | | | | | 308 | 34642 | CTCGCCGTCGTCGAGCGGGGGAATTCTTTCTGTGGGTTTCAAACGCAACG |
| | | | | | | 519 | |
| | | | | | 309 | 17600 | CGCCCTCCTGTCCACCTGCTGGCGCAACCTGCTCCCCCGTCTCTAGGGGT |
| | | | | | | 122 | |
| | | | | | 310 | 35027 | CGGGCCGGTTGTACGCTGTCCACACCGGTTCTCCCACAAACAGCCGCATG |
| | | | | | | 90 | |
| | | | | | 311 | 17073 | GGCGGGCGCCTCCATCCTGGGCGGGCGGAAGGGCTGGGCTGGGCTGGGCG |
| | | | | | | 6335 | |
| | | | | | 312 | 13492 | GGTTGTAGGTTGTGTGTGAATCTGGTCCCTGGCCCCAGAGCTCTGCCTCG |
| | | | | | | 1759 | |
| | | | | | 313 | 10090 | CTCGCCGAATTGCAAGAGAATCTTTAGATCTTGTTCCCACTGTAATCCCG |
| | | | | | | 4316 | |
| | | | | | 314 | 28956 | CGCCACACACCCCGAACCCCCAACACGTTGCTTTCGCACTGATGGGAGCA |
| | | | | | | 577 | |
| | | | | | 315 | 80545 | CGGTCCACGGCCAGGTGAACAATGGTAAGACATGCTGGTCGGTGGCTCCC |
| | | | | | | 125 | |
| | | | | | 316 | 49312 | CAGAGGCGGTGTATAAAACATACGCTGCTTCGGGAACTGCGAGGGGGACG |
| | | | | | | 033 | |
| | | | | | 317 | 15086 | CGGGGCACAGAATCTCCCTACAATACCGTCTTTGGATGGTGGGCATATCT |
| | | | | | | 7810 | |
| | | | | | 318 | 75728 | CGGCTGGGGCAACCCGATTTCCCCACGCCCCCGCACCACGCTCTCCCTTG |
| | | | | | | 458 | |
| | | | | | 319 | 11913 | CGGTTGGATCTTGCCTTTATTGAACATTTTAACAATTTGGTTACTGTGGA |
| | | | | | | 3091 | |
| | | | | | 320 | 27523 | GGGACCGACGTCATGGTTCGGTGCCTCAAGCTGCTGAAGGAATTTAAACG |
| | | | | | | 174 | |
| | | | | | 321 | 39694 | AAGTGCGCGTCCCGTCCGAGTGCTTGAGGTCGGCGGAGGCGGGGCAGGCG |
| | | | | | | 831 | |
| | | | | | 322 | 10119 | AGGAGCAAGAGGACGCGCAGGAGGGCTTCGGTCGCGGTCATCTCTGGGCG |
| | | | | | | 3397 | |
| | | | | | 323 | 46800 | CGCCCCGGGGCGCGCAGTTGGAGGCACATCCCCACCGCACTCTCCACCCT |
| | | | | | | 467 | |
| | | | | | 324 | 49311 | CGCCTCTAGCTGGGCTGTCATTTGTTCTCAGGAGAACACCCCGTCCTTCT |
| | | | | | | 15 | |
| | | | | | 325 | 88791 | CTGAAGAGTCAGAGTAGCACCATCAGATTGGTACCAGTTTTGCCTGAACG |
| | | | | | | 298 | |
| | | | | | 326 | 58357 | AGGCAGGTGTCAAGCTGGGGCTCTTCTTATTGGACGTGAGGGCCGAGGCG |
| | | | | | | 987 | |
| | | | | | 327 | 15726 | CGCGCCTAGGTTTTCGCAGCTGGTTTCTGTCGGTGGGTTGTTAATAGGCT |
| | | | | | | 821 | |
| | | | | | 328 | 26271 | AGTTTTTCTTTCAGGTAGTCTGAGATGGCCCGCACCAAGCAGACTGCACG |
| | | | | | | 587 | |
| | | | | | 329 | 32110 | CGCCCCCAGACTCCGACTTAGAGCGGACTCCGATCGCGGCAAACCATGGC |
| | | | | | | 145 | |
| | | | | | 330 | 32596 | ATGTAAGGGATATTCCCCTTTTCCCTTTGGAGTGGTATCCCTAGGACACG |
| | | | | | | 886 | |
| | | | | | 331 | 19743 | GTAGTTGTGGGTGAAGCAAACCCTAATTCCAGAAGTTTTTTTCCCTAGCG |
| | | | | | | 759 | |
| | | | | | 332 | 15089 | GAGCCAATGAGGCGGGAAAGTGGCTGCGAGAGCGGCTGCCAACTCGGCCG |
| | | | | | | 6413 | |
| | | | | | 333 | 13421 | CGCCACACGCCCCGACCCCAGAACATGACCACCCGTCAGAGCCGGGTACT |
| | | | | | | 61 | |
| | | | | | 334 | 35078 | TGTGTCAGGGGCCCGTGTGTTTTGGCGACACCCGATTGTCATTTCCTTCG |
| | | | | | | 67 | |
| | | | | | 335 | 11372 | TTCGTTTGAAATGGCCTCTGTCAGCGCATCTTGCGCGAAATAAAACACCG |
| | | | | | | 2758 | |
| | | | | | 336 | 10184 | CGGAGAGGCATAAAAGCCATCACCCAGAAGCAAATGTGTTTGGGCTCCTT |
| | | | | | | 1158 | |
| | | | | | 337 | 10131 | CGCGGGAGTGGCCAAGCTACCCAACAGGCTTCACACCACTCGTTCATGCA |
| | | | | | | 7622 | |
| | | | | | 338 | 97831 | CGCGCTCGACTCCCGCCCCACCTGTGCCTTGGCGCCCTCGCTCACCGCCC |
| | | | | | | 98 | |
| | | | | | 339 | 51290 | CTAAGATCTGCTGAGAATCCCCAAGGTGCTCCAGGATTTTCAGTGTTGCG |
| | | | | | | 751 | |
| | | | | | 340 | 11513 | CGTTAGGAAGATCTAAACTGAAGCACTAGAAAGGTCTGTGACTCTGTTCT |
| | | | | | | 1789 | |
| | | | | | 341 | 85671 | CTTGCGTGAGCAGTAGCCTCAGCTCTGCGTTCTTTGGACACTTTCCAGCG |
| | | | | | | 811 | |
| | | | | | 342 | 91687 | CGGCAGCTGTATCTTCTGGGATGGATTCTTATAGCACCTATTTGGCAACT |
| | | | | | | 463 | |
| | | | | | 343 | 45008 | GAAATGGTTTAATTCATGCTCAGGAGCTGTGTGCCTTTCCATCCCTTCCG |
| | | | | | | 447 | |
| | | | | | 344 | 31637 | CGCTGCTCAGAAAGAAAACCTCACTGATAGGACCTCCACCCAGACCTCTT |
| | | | | | | 55 | |
| | | | | | 345 | 12344 | TGGTAGTAAAGACAGCGGCTGTTTATTAAACTCTGCTTATCTCAGCTTCG |
| | | | | | | 6272 | |
| | | | | | 346 | 75958 | CGGGCTGACACAAATAGGCTTCTTCAAGAGTTGAGGAAGAAAACAAAATC |
| | | | | | | 299 | |
| | | | | | 347 | 42688 | TCCCGCTTTTGCTAAGCGTGGCGGGTCCCAGGCAGGGTTGGGGAGCGACG |
| | | | | | | 886 | |
| | | | | | 348 | 36628 | CGGCGCTGGACTCCCTCCAGGTCACACCGCCTGAGGTCACACCGTCTGGG |
| | | | | | | 713 | |
| | | | | | 349 | 20359 | CACAGAGAAACTGCTGAGGTTTCTCTGCAAAGCTAAAGAAATTTAATTCG |
| | | | | | | 6940 | |
| | | | | | 350 | 24281 | AATCTGGTTGCCATGGAGACCATGCTGTTGTCAAGGTGGCTGATTGGCCG |
| | | | | | | 1830 | |
| | | | | | 351 | 43393 | CGCCCTCCGTCCCACGGTTCTGCTCCGCAGGGAGGCTCGGCCCCATCTCT |
| | | | | | | 728 | |
| | | | | | 352 | 20548 | TCCGGAAGGCAAATTATCTTTCCACACCAGAAAGGTTTATAAACAAGCCG |
| | | | | | | 412 | |
| | | | | | 353 | 30661 | CGGAGCCACAGGCCGCACCAGCCCGTCTTTGATCCCGGGTGTTCGGACTC |
| | | | | | | 534 | |
| | | | | | 354 | 16642 | CCGCGCGCTTCATTTTTATCAGGCTCCTGGGTGTGTGCAGGGAGGGAACG |
| | | | | | | 2671 | |
| | | | | | 355 | 16491 | CGCTTTCAGAGGAATTTTTTTAAGGCTCAGCTGACAGCACTACAGTCCTG |
| | | | | | | 1744 | |
| | | | | | 356 | 36040 | CGCCGGAATCCCACCAGCCTGCAGCCACGGTAGGCAAGAGCCTCGGGGAA |
| | | | | | | 903 | |
| | | | | | 357 | 12899 | TGTCACTTACCTAGAGATGTTCTCACGAGAGCTTGCGCCTACCAGGATCG |
| | | | | | | 8642 | |
| | | | | | 358 | 25241 | TACCGGCCGGAGGACACGGGGGGACGCTGGGAACTCGGGGTGAAGGGAC |
| | | | | | | 260 | G |
| | | | | | 359 | 26273 | CAAGTACACCAGCTCCAAGTAAACTAGTTACCTGGGTAAAAGCGCTAACG |
| | | | | | | 611 | |
| | | | | | 360 | 15802 | GTAATGTCCTCATAGATTGCTTGTATCTTCAGCTGCGTCTGTGGCCTGCG |
| | | | | | | 7914 | |
| | | | | | 361 | 23847 | CGCCCGCAAAGGCGCCCTCCGGCAGAAGAACGTGCATGAGGTCAAGAACC |
| | | | | | | 556 | |
| | | | | | 362 | 75315 | GAAAAGTGTTTTGTCTGAAGAGCAGAACTGTCTTATACCAGCCCTGTGCG |
| | | | | | | 081 | |
| | | | | | 363 | 11271 | CGGGCGGGCTGAAGCCCCCGCGCAAGTTCGAGACACACTTACAGTTAGTT |
| | | | | | | 1380 | |
| | | | | | 364 | 14021 | CTTTCTATTGACTAATTGTCAAGACATTAGACTTCCATCTGGGAGATACG |
| | | | | | | 9613 | |
| | | | | | 365 | 12201 | TCCCTTCAGTGCTTCCGAAGACACCGGAGGGGAGTACCCCGCGTAGAGCG |
| | | | | | | 7052 | |
| | | | | | 366 | 10299 | TGGCCTTAGCCCGGACTGTGAGTCTCGAGCGGCTTCCGAGAGGCAGCTCG |
| | | | | | | 7382 | |
| | | | | | 367 | 20001 | CGGCCTCACCCAGCGACCCCAAGGGTAGGCCCTCTCCGGAGCTGCCGGCT |
| | | | | | | 0283 | |
| | | | | | 368 | 15408 | CCCTTCTGACGACTGTACGATCTGATGATAAATCATGTGTTTGAGACTCG |
| | | | | | | 7975 | |
| | | | | | 369 | 51973 | CGGCGACGTACACTGCTGCTTAGGGAGCAAAGCACTTCCACCGCTTTCAC |
| | | | | | | 27 | |
| | | | | | 370 | 14107 | TAATATCTATTAGGAGCTTCTCAGCAGGACCAGGACTTTAAGGACTTTCG |
| | | | | | | 1438 | |
| | | | | | 371 | 10090 | ACAGGTTAATAAACAACCTGTCCGGCACAGGTTAACAGGAGCCTCTCTCG |
| | | | | | | 3909 | |
| | | | | | 372 | 32116 | CAGAGGTGGCCACCCCTGTTCCCCTCCTGGCACCATGATGGTCAGGACCG |
| | | | | | | 56 | |
| | | | | | 373 | 51568 | CTAGTGATCGCCTCCCTGACCTTGGCCTTGTCAGGAGGTAAGAATGCGCG |
| | | | | | | 260 | |
| | | | | | 374 | 42387 | GCTGCTCCCTGGAGCTTGCTCAGGTCAGGTGAGGAGGATACACTAGCCCG |
| | | | | | | 193 | |
| | | | | | 375 | 11958 | CGCCTAAGCCTGGCAGAGGCAAAGCGCTAGACGGAGCACCGCAAAAGCCC |
| | | | | | | 326 | |
| | | | | | 376 | 94452 | CGCAGAAATATCTCTCTCCGCCCGAGAGGAAGCGTCTGGCCAAGATGCTG |
| | | | | | | 236 | |
| | | | | | 377 | 75316 | CGGATGCATTCGTGATTGCAACAGATTGAAGAAATTAGACCAGACAAAGA |
| | | | | | | 233 | |
| | | | | | 378 | 13366 | ATATTATTTATATAGATTGTCCTCCCACTCGTCCTCAGCCTATAGGAACG |
| | | | | | | 2267 | |
| | | | | | 379 | 96148 | CCCTCTCCAGAAATCAATTAATTTCTCCCATGGTATTACTGTAAATATCG |
| | | | | | | 290 | |
| | | | | | 380 | 72756 | AGAGCCGAGATTTGGGCTCTGAAGCCCGACGGCCCTTCAACATGTCTGCG |
| | | | | | | 882 | |
| | | | | | 381 | 21926 | CGCGCATCCGAGACCGCCTCCCCAAAGCCCGCTTCATCGCCAAGAGCGGG |
| | | | | | | 476 | |
| | | | | | 382 | 10091 | GACCCCTCCCCGCAAAAGGCAAAATCAAGACTACAGAAGGTGAACTTTCG |
| | | | | | | 5805 | |
| | | | | | 383 | 78176 | CGGTGAGCTGGCTGCGGAGGAACCAAAGAAAAATGAATCCTCGAGGAACC |
| | | | | | | 806 | |
| | | | | | 384 | 13392 | CCTCTGCGGCAGAGAACTGCTTCCCGGTGAGCTCGTGGTGGGTGGAGGCG |
| | | | | | | 131 | |
| | | | | | 385 | 10099 | ACCATGCCGTTGTACCGTCTGGGTACAGAGCAAAGGGTCTCGTTTTTACG |
| | | | | | | 6070 | |
| | | | | | 386 | 38624 | GGCCTGCAGGCGCGACCTGAGGCCGCCAGGGAGGCTGGGTGGCGAGGGCG |
| | | | | | | 23 | |
| | | | | | 387 | 46951 | CTGGGTGGTGGGCGGCTTAGACCTAATTCCGGAGTTAATGGCGGCGGCCG |
| | | | | | | 477 | |
| | | | | | 388 | 49893 | CACGGGGCTGCCCTTTTCCACCCCTAGGGGCCTGCTGAAGACTGAGGACG |
| | | | | | | 122 | |
| | | | | | 389 | 13412 | CCTTGGGCTCTGGGCACTATGTGGGAGGCAGCATCAGGTCCATGGCGGCG |
| | | | | | | 5181 | |
| | | | | | 390 | 51139 | CGCGAGTTCGGAGCAGCGCGTGTATCTGTGGGTCTTTGGGGCTGGCCTCG |
| | | | | | | 066 | |
| | | | | | 391 | 73578 | CGGCAGGCCTGATTGGTGGGCTTTTAAACGTGACTAATGAAGAAAATTTA |
| | | | | | | 307 | |
| | | | | | 392 | 95437 | AATTAAACCCATAACCAAGGAATATACTAGGTTCAACTATGTACTTAACG |
| | | | | | | 294 | |
| | | | | | 393 | 10622 | TCAGCAAAATAAAGGATTCACTGCAATTCATCCTTCTGTGGTCACTGCCG |
| | | | | | | 7786 | |
| | | | | | 394 | 13702 | TTTTTGGACTGGAAGGCGGGGAACCTGATCCTGCCTTTGACTCAATTACG |
| | | | | | | 8442 | |
| | | | | | 395 | 68781 | CGCCATCTGATTGCTATTAGGGCTGGGGAAAAGGGAATTCCTGGTTCCAT |
| | | | | | | 279 | |
| | | | | | 396 | 28550 | CGGCAAATAGCGACATGCTCTCGGTTTCTGTCGGCCTTGGCCTGGCAGAG |
| | | | | | | 046 | |
| | | | | | 397 | 68924 | CGGCCACCTCCTCCCGACGCTTTCAGCAGCCCACGCGGCTCTTCCGGCCC |
| | | | | | | 853 | |
| | | | | | 398 | 31021 | ACAGCAGTGAGGTTAGAACGTGAGGGGATCACAGACTTCGTCCACCTTCG |
| | | | | | | 003 | |
| | | | | | 399 | 62584 | AAATGTAAACCTTAGGATTGGTTCTTGGGTGAAGAGTCCGCTGCTCTTCG |
| | | | | | | 513 | |
| | | | | | 400 | 15811 | CGCGGAAGCCTAACCCCCAGGTGCTCCTCGATGACGGCTTCGTGCCTTCT |
| | | | | | | 4659 | |
| | | | | | 401 | 85997 | CGGGGCTCGCTCCCGCACTTTGAAGGCTGCCGCGGTCTTTCGTCATTTAT |
| | | | | | | 753 | |
| | | | | | 402 | 19915 | CGCACCCATCACCTAACCGTGTCTCTGGTCACCTGTGGGTTTCAGCGGGT |
| | | | | | | 874 | |
| | | | | | 403 | 10357 | CGGCCACACCGCTGGAGTCCTGGGCTGGCAGCGGTAACCTTATCCTTGTG |
| | | | | | | 4523 | |
| | | | | | 404 | 21961 | GAGGACCTCGCCGCTCTGAAGAGCACCGTGCACATGTGGGTGCACAAACG |
| | | | | | | 713 | |
| | | | | | 405 | 46969 | CGGCTCCATGGTTCTCATGCCCCAAAGTCCTGCAAATTGACACGTAAGTA |
| | | | | | | 673 | |
| | | | | | 406 | 23243 | TCAGAGGACTGAACAACACCAGAGGCGTGAAGCTTGGTGCACGGCAGCCG |
| | | | | | | 96 | |
| | | | | | 407 | 14919 | CGGCACTCATAGATCCGCACGTCCCGAGAAGCCTCTGCCATCCCAACCCG |
| | | | | | | 2846 | |
| | | | | | 408 | 85405 | ATGGCTGGACTTGCTGCGTGGGTGATCCCAGGACTAAGGCAATTAGAACG |
| | | | | | | 132 | |
| | | | | | 409 | 47483 | GGCTCCTCCAGGGTTCCGGCTGGTGGGAATCTAGGGAGGTCCAGGAGACG |
| | | | | | | 257 | |
| | | | | | 410 | 75315 | CGGCTAGAGACTCACTGACTCATGCGTGTGTGGTAGGAATCTTCCAGGAA |
| | | | | | | 503 | |
| | | | | | 411 | 14062 | CGTTTCGAAGCAAAGACAACGCATGGTGGCGCTGCAGGCTAAGGCTTCAA |
| | | | | | | 4869 | |
| | | | | | 412 | 22028 | TCAGAAACTCCTGGTTCACCGCGTCGGCCAGTGAGAAGTCCAGCAGCTCG |
| | | | | | | 3442 | |
| | | | | | 413 | 11906 | TAATACAATAACAGAGGCCTCCGCTCCATTTGCATTAGGTGAGGAGCGCG |
| | | | | | | 7552 | |
| | | | | | 414 | 13099 | CGCCGGGGCCCCGCCCAGGCCCTAACGAATACATCCCATTGGCAGGAACC |
| | | | | | | 6123 | |
| | | | | | 415 | 55047 | CGCCCAGCCTCGCTGTTCTTATCTTGGCAGCAGATTCCGAATGTCGGCTG |
| | | | | | | 721 | |
| | | | | | 416 | 60386 | CGCCCAGTGAGGTCCAGAGAAGAGAGGGACCTTCCGAGGGTCTTCTAGTC |
| | | | | | | 272 | |
| | | | | | 417 | 19788 | TCTCCTTAGAGGGACTGAGTCGGGATGCCAGAAACCCTGAGATTCTCTCG |
| | | | | | | 7649 | |
| | | | | | 418 | 33701 | CTGCGGCTGAGGCAGGCTCCGCAGACCCCGAGCCAGAGTGGGATTTAACG |
| | | | | | | 350 | |
| | | | | | 419 | 56941 | GATGTGCTGCCGGGCTCAGGTCCCGCAGGAGACCCACCTGGAGTTCCTCG |
| | | | | | | 473 | |
| | | | | | 420 | 10187 | CGGCCCCTGAACTTTTGCCTGCACCGGGGCCGCCCCGCACCCCCCGCCAA |
| | | | | | | 5035 | |
| | | | | | 421 | 50557 | CGTAGAGCTGGAGGGCGATGGTGGCGGAGCTGCTGGGGGCGGAGGCAACG |
| | | | | | | 066 | |
| | | | | | 422 | 15162 | CGCATTTGGGGACTCACCTTTGGAGAACTTTTGAAATGTGGCAGTTTAGT |
| | | | | | | 0975 | |
| | | | | | 423 | 46922 | CGCCCCCTCACCAGCGCCTAGCCAGTCCGTGTCCCTCCGCCTCCAGGAGG |
| | | | | | | 87 | |
| | | | | | 424 | 60027 | CGACCCCGCCCTGCCGCCCACTGCCCTTTCCTGCGAGACCCTGGCTCCGC |
| | | | | | | 66 | |
| | | | | | 425 | 62660 | CGCGCCCTTCGCGCCTGGACCAGCCTTATCCGGGGCACCCTGGACCTCAC |
| | | | | | | 861 | |
| | | | | | 426 | 84628 | ACGTTATGCTTACAAATGTTTGCTGCTAGAGATCTGGCACGACAGTGACG |
| | | | | | | 969 | |
| | | | | | 427 | 47696 | CGGCGAGCGCTGCTCAGCTTCAAGCCTGGAGGAGCCTCCCACTCACCAAC |
| | | | | | | 788 | |
| | | | | | 428 | 26273 | CGTTTGGGCTCACCAGCATTTTCCTGTGGTCATTTGACGGTATCACTTCG |
| | | | | | | 193 | |
| | | | | | 429 | 68172 | CGGCTGCCCTAAAATGAGAGTTTGTCTTTGAGTTGGATCATGACTCTGTT |
| | | | | | | 80 | |
| | | | | | 430 | 13251 | CTTGGAAATGACAAACACTCCTCGTGGTCGTCTGATCCCAGATCATTGCG |
| | | | | | | 3895 | |
| | | | | | 431 | 88717 | GAGGAGTTCTGAGACCCCCAGTAATTCCCTTGCAGACCCTGCGGAGCGCG |
| | | | | | | 134 | |
| | | | | | 432 | 67069 | AGTAGGCTGGGAGGCTGCAAGAGCGAGTGCGGAGCTGGGTGACAGCAACG |
| | | | | | | 959 | |
| | | | | | 433 | 14008 | AGCCCGCTGTGTGCAGGGTGCAGCAGTGACAAGCAACAGTGCTGGTGTCG |
| | | | | | | 1972 | |
| | | | | | 434 | 44654 | AATGGGATCTAGTGCTTCTTACCTGATGGACAGGTTCTATACCATTATCG |
| | | | | | | 206 | |
| | | | | | 435 | 10089 | CGGAACTTTGTGAACAGCTGGGGACTATGCTTAAAGACAAAGTCTGACTG |
| | | | | | | 7081 | |
| | | | | | 436 | 29976 | CGGAGGAGCTGACTACCAGAAGCCCCCAGTGGGTGTTAAATCACAAGCTA |
| | | | | | | 613 | |
| | | | | | 437 | 18306 | CGGTCCCATTATCCCGAGCACGACCGGCTGCGTTCACACCGCAAAGTCAC |
| | | | | | | 2301 | |
| | | | | | 438 | 18141 | CGGGTGCTTTTAAATACACCTGGGTATTATGAGCATGTAATCTGGCCTAA |
| | | | | | | 3810 | |
| | | | | | 439 | 16532 | CAGAATCTCTGGCTTCAGCTCTGCAAGACCCGTGTGTGGACACTCTTCCG |
| | | | | | | 4100 | |
| | | | | | 440 | 13414 | CGCGTTCCTTGTTGAGTCATTTCCTGTCTTGATTTTAGGACCTTCCTCCG |
| | | | | | | 3489 | |
| | | | | | 441 | 11529 | CTTTGGGTTCGAAGAGACAGACCCCACGGAAGATGCCTCCAGGGTTGGCG |
| | | | | | | 7989 | |
| | | | | | 442 | 23859 | CGCGCCTGTGAGCACTCACCTTCCCGCCGTGACCCGGGCCCAGGGCTTCA |
| | | | | | | 9734 | |
| | | | | | 443 | 58414 | GTACATGGCACTTGAGGTTCACTTTGTCCAAACCAGTACCTCTTATCTCG |
| | | | | | | 82 | |
| | | | | | 444 | 14711 | CGCTGTGACCGCCACAAAGTGAATCCTTTCGGTGCGGACAGTCGCCTTCA |
| | | | | | | 1660 | |
| | | | | | 445 | 21490 | CGCAGCAGCCCAGGGACGCGATGACACTTTATTCCCGCGTTCCACACCGC |
| | | | | | | 238 | |
| | | | | | 446 | 13663 | ACCTGGCAGGGCTGGGGTGGGGATTGCAGCTAGTCCATGACCCAACTACG |
| | | | | | | 0705 | |
| | | | | | 447 | 37390 | CACTCACACACAGTAAGCTGGGTCCGGGGGGTCAGTTTACCCATAGATCG |
| | | | | | | 176 | |
| | | | | | 448 | 45179 | CGGCGCCAGTGTGTCCCGGGCGAGGTAGGGGCAGGCAAAAGGCGGCTGCG |
| | | | | | | 787 | |
| | | | | | 449 | 15479 | TGTAGTCACCTGATTAACAAGAGCCAGAGTTCATTGCATGCTGATCAACG |
| | | | | | | 6431 | |
| | | | | | 450 | 36919 | CGCAATAATGCTGCGTCACGAAACTGCGCATTCCAAGAGAAACTTTTCTC |
| | | | | | | 738 | |
| | | | | | 451 | 12194 | CGCTGAGGCAGCGGCAGACTAGAGCTCCTGGTCCGAGTTCGTCTGCAGAC |
| | | | | | | 2010 | |
| | | | | | 452 | 15727 | GCCCCGGGCAGAATAGGTGACTACAGATATTCTCCTGATGCGACAGGTCG |
| | | | | | | 525 | |
| | | | | | 453 | 38214 | TCAGAGCCTCTGATTCTGCAGAACGCAGACTTGCAGCTGGTCCACGGCCG |
| | | | | | | 979 | |
| | | | | | 454 | 17519 | GGACTGGGGACTGCCCCCAACTTCCGAGCGGCAGAATCTGGCGCTTGGCG |
| | | | | | | 1374 | |
| | | | | | 455 | 23900 | CAACCTCGCTGAGTTGGTGCAGCTCCAGGTCATTCCTGGGGTGGGAATCG |
| | | | | | | 7828 | |
| | | | | | 456 | 19212 | TTTCACACATTTTGTCGCCACTGCCCAGACTTTGACTAACCTTGTGAGCG |
| | | | | | | 6165 | |
| | | | | | 457 | 80981 | CGCCCAGCCCCCAGCTCTTTGTTCTGGCGCAGCCTTTAGCCTCAGAGCGC |
| | | | | | | 129 | |
| | | | | | 458 | 25102 | CGGATACGCACCCACAGTGGCTGATTCGGGGGTAACCGTGTCATTTGCTT |
| | | | | | | 274 | |
| | | | | | 459 | 20001 | GCAGCCGAAGTAGGCGTTTGGGGAGGCGAACTCATCGGGGCAAAGAAGCG |
| | | | | | | 0788 | |
| | | | | | 460 | 67085 | CGGAACATGTTTGCTTATTTATCCATAGTTCTCCTAGGAAGGACGGTGTT |
| | | | | | | 823 | |
| | | | | | 461 | 22510 | CGTGGCCGCTCTCAACTCCTCCAATTGCGGGTTCCAGGCCATCCGCGGAA |
| | | | | | | 61 | |
| | | | | | 462 | 60289 | CGCCCCCTAGCCATTCTTAGCTGGGGGAGGCCAGCACGGATCAGCCGCTT |
| | | | | | | 532 | |
| | | | | | 463 | 16554 | CGCCTCCACCCTGCCCCACCCAGGCCGCGCGCACCCCGGAAACCTGGACT |
| | | | | | | 466 | |
| | | | | | 464 | 16691 | CGCCTGCAAGACCGCATTTGTTCTCTTAACACAGGGCAGTGAACGGCCGC |
| | | | | | | 7158 | |
| | | | | | 465 | 51190 | CGGAAAGTCAAAATCGCAAGCACTTGCAGTCGCTAGCGAAGTCGGTTTCT |
| | | | | | | 201 | |
| | | | | | 466 | 10072 | ACAGGTAGAAGACCAAAAGGCCAATGAGACTTCTTTCCTATTTGAGATCG |
| | | | | | | 2584 | |
| | | | | | 467 | 45250 | TCTGCTCAGGGTCGTCGCTCATGCTGCGGGCGGGAGGGCGGGCTGAGCCG |
| | | | | | | 181 | |
| | | | | | 468 | 19813 | TACGTCAACGCGGGCTCATTCTGAGAAAAACTTTCTTTAGCTTGTACGCG |
| | | | | | | 299 | |
| | | | | | 469 | 37123 | ATGAGACGGAGGGCACCATGGGAGCTGGCTCTCTTGCTATTCATAAAGCG |
| | | | | | | 843 | |
| | | | | | 470 | 18963 | CTTTCAGGTTCCAGGGCACTCGCCACTTTTTCCAAAGCCATCAGTCTGCG |
| | | | | | | 958 | |
| | | | | | 471 | 32459 | CTCTTTAGTCGGAGAAGTCCAAGTCGGGCGAGGGGGCACCCCGGGGTTCG |
| | | | | | | 428 | |
| | | | | | 472 | 26190 | TGCGTTGGGAAGGCATGGGGTGCGGAACCCGGCCTGACCTCGCTGTCCCG |
| | | | | | | 328 | |
| | | | | | 473 | 27806 | TTCAGAGGTCCCTAGCACTCACTCGTGTGCTTGTGATTTGCTAGACTTCG |
| | | | | | | 529 | |
| | | | | | 474 | 11671 | CCCTCGCTGGGGCACCTGGGGAGGGGGCGCTGGGGCACCTGGAGAGGGCG |
| | | | | | | 0943 | |
| | | | | | 475 | 54971 | CGCAGTGATCCCGTGACCCCTGTTGCTAGACATCCAGAGGCTTCTGGTCC |
| | | | | | | 018 | |
| | | | | | 476 | 10048 | TGCTGAGCCCCCGCCGTGTACGGGGGCCATTGTGGGGCCTTGGGGTCTCG |
| | | | | | | 8942 | |
| | | | | | 477 | 89949 | CGGAGAAAACACTTCACCCTGGAACCCTAACTCAGGTCCTGGCAAAAGAT |
| | | | | | | 694 | |
| | | | | | 478 | 12293 | TATTTAAAGCTCAGAATATGATAAAGGTCCTGTCTCCACCACTTCAAACG |
| | | | | | | 5222 | |
| | | | | | 479 | 15086 | GTGGGCGGGGACAGGGCCCCTGCTGGAAGAGGCGCAGCAGCGAGGTGGC |
| | | | | | | 3969 | G |
| | | | | | 480 | 85424 | CGCCGTAGGATCTTGCGTTCGGCGCTCTCCCAGTGGAGGCCAACACCAAA |
| | | | | | | 288 | |
| | | | | | 481 | 45914 | AGGGGTCGGGGGCTCACACGCCCTGCGATTTCCTCCCATGAGAATGGGCG |
| | | | | | | 450 | |
| | | | | | 482 | 11867 | CGATCCTTGGGCTATAAGCCATCTGACTTCAACTATCACTGCTGTGTTTG |
| | | | | | | 7172 | |
| | | | | | 483 | 11216 | CGCCGCCCCGCAGGAGCACGCACTCCCACACAAAGCGCCTGCAGCTGACA |
| | | | | | | 57 | |
| | | | | | 484 | 38068 | ACAAGGGGTCACACGTGCGTGTGCCTGGCCTTCGCAGGTGGATGTGTGCG |
| | | | | | | 340 | |
| | | | | | 485 | 15268 | CGCCCACTAATTCCTTTGGTGCTGCTCCTGGTCCAGGTCAGCAACAGCCC |
| | | | | | | 1887 | |
| | | | | | 486 | 15156 | CGTGGTTTAACAGTCAAATATTAGTGTTAGTTGCTCATGCACCATGATTG |
| | | | | | | 2205 | |
| | | | | | 487 | 25908 | CGGATTTCAAGAAGTCTTTGACGGTGCAAACTGGACTTCTAATCATGGGA |
| | | | | | | 279 | |
| | | | | | 488 | 15852 | ACGCAGTGCGTGTCAGGTAGGAGTAAATGCTTATAGAGTTTCATCTCGCG |
| | | | | | | 4404 | |
| | | | | | 489 | 70014 | GCAGCGTCAGTCGTCTGCAGGAATTTGTGCTGGGGTAAATGCGCGCTTCG |
| | | | | | | 873 | |
| | | | | | 490 | 44163 | ACTTAGGAAACAGGCCCAGGGAAGTAGCAGAACAGTAGCGCTAGAGGAC |
| | | | | | | 975 | G |
| | | | | | 491 | 46143 | CGGCCCCGCCGGCCTCGCACCCGGTAATTGCAGCTTCCCCCCGGGGCCCT |
| | | | | | | 498 | |
| | | | | | 492 | 28839 | CGCGGGCTGCTACAGAATCCCAGCCGGGCTTCTACCATCCAAACCCCTTT |
| | | | | | | 249 | |
| | | | | | 493 | 18254 | TCAAGAACATCTGACTCCACCATAATTCTCCTGTATTGCACAGGATGTCG |
| | | | | | | 7599 | |
| | | | | | 494 | 10717 | CGCGCCCCCAGCTTCGCGGCAGCTAGGTCCCTCCCCAGCGCGCTGAGCTC |
| | | | | | | 9321 | |
| | | | | | 495 | 96180 | ATCCTGGTGTCGACTGTGAGTTCCCAGCAGAGGCCCAGAGTCCCGGTCCG |
| | | | | | | 842 | |
| | | | | | 496 | 42445 | CGCCTGGCCCCGATCAGTCCCCACCAGGACCACCTATTTCCCCAAGTCGG |
| | | | | | | 244 | |
| | | | | | 497 | 36983 | CTCCTCGCCGTCTACAGTCGGCATAGTTTGAAGTCTGTTTACTTGTCCCG |
| | | | | | | 694 | |
| | | | | | 498 | 15836 | CGATGTCAGACATTTCATGTCCTGTCCATGTGGAAGACTGCATCCTTGAC |
| | | | | | | 1858 | |
| | | | | | 499 | 81106 | TGAAGTGGAGCAGACTCACCGGCAAGGAGCCCGGAAAATCGTCAGGGGCG |
| | | | | | | 663 | |
| | | | | | 500 | 91295 | GGTGGCTCAGGTGACACGGGCATCCTTCAAGGAAGGGCGGCGGGACGGCG |
| | | | | | | 159 | |
| | | | | | 501 | 19788 | AATCCTCCTTGCAGTAAATGCTACCGTCCTTGGCAAAGCAGGTGAGCTCG |
| | | | | | | 9248 | |
| | | | | | 502 | 20145 | ATAAGACCATCAAAAGCAATGTCCCAGGACTTACAATGTTTGCTAAGACG |
| | | | | | | 0506 | |
| | | | | | 503 | 48056 | CGTCGCCAGTGTGGGAGATCATTTATAATCTTGATGGATACAGGTATAGC |
| | | | | | | 973 | |
| | | | | | 504 | 13296 | TGTGGGCTGTGCCAGAACCCTGGGAAGAGCAACGTGGTCGGAGGGTCCCG |
| | | | | | | 9187 | |
| | | | | | 505 | 11033 | CGGTTTCGATTTGGGACACCACCTGTCAGCCAGGCAGGTTAAACTGACGG |
| | | | | | | 9005 | |
| | | | | | 506 | 81189 | CGCACCAGCGAGTCCCAGGGCCTCCCTCACACTCCCGAGAGGAATCTATT |
| | | | | | | 927 | |
| | | | | | 507 | 38942 | CGGCGCCCCCTCATTAGAGGGCGTTTGTTAGGGAATGTTTTCCCAGCGAT |
| | | | | | | 313 | |
| | | | | | 508 | 10848 | CGACCCAGTCCTGACCCGGCCCGCTGCGCGCCGACCTCCTAGCTGCCCCG |
| | | | | | | 9977 | |
| | | | | | 509 | 38036 | GGGGCAGTCTTGGGATGGCCATCGTCCACATCCCTGAATGGGGCAAGCCG |
| | | | | | | 060 | |
| | | | | | 510 | 69223 | CGGGGGCCTAAAAAGACTGCTTACATACACCACCTTGGATCTTTCAGATT |
| | | | | | | 20 | |
| | | | | | 511 | 75315 | CGTCAGGAATTTGACTCTGTGAGTTGGTTTCCAAGAGTCTAAGTTAAGCA |
| | | | | | | 868 | |
| | | | | | 512 | 78933 | CAGGGGGCGTCGGGGCGGAGCAGCGGGCCCAGTACATCCCTGAGTGGGCG |
| | | | | | | 630 | |
| | | | | | 513 | 17263 | CGAGTGTGGCCTTTCAAAAAGAAGTGCATTCTAATTTTAAGTTGAAGTTC |
| | | | | | | 5656 | |
| | | | | | 514 | 12876 | TGTATTCTTGGGGTTCGGGCTGTATTCCTGGACCCCGGCTCCCGGGTCCG |
| | | | | | | 4824 | |
| | | | | | 515 | 13421 | CGACAAATACGAGAACGGGTACATTCACCCGGTCAACCTGGTGAGTGCTC |
| | | | | | | 0946 | |
| | | | | | 516 | 88326 | CGCTGATGTGCTTTAATAGCGTGGTAGTGAAGTCCACCATCAAAGCAAAT |
| | | | | | | 918 | |
| | | | | | 517 | 10185 | GCCTTTGATCCTGTGTTGGGACAACTTGGGTTTTCCTGGGTGCCCACCCG |
| | | | | | | 0540 | |
| | | | | | 518 | 36982 | CCCTGAATTACGTACACAGCTAGCAATTAAAAATTAACCTGTGGTCCCCG |
| | | | | | | 194 | |
| | | | | | 519 | 44325 | CGTCCGGGTGCAGGACGGCGCTCTTACCGCCCCACCCCAAACCGTTGCCT |
| | | | | | | 823 | |
| | | | | | 520 | 51184 | TGTTCCGGAGACGGTGCAAACGGACGGGGAAAGTGTCGGGGTCTGGCTCG |
| | | | | | | 355 | |
| | | | | | 521 | 10139 | CGGGAGGCAGCAGAGCCATGGCGGCCACCCGCCTCTCACAGGGACCCAGA |
| | | | | | | 90 | |
| | | | | | 522 | 10540 | CGGAGTGATCTTCTGCATCAATCTAACATCTTGATTTTGTGCGATCACAA |
| | | | | | | 5068 | |
| | | | | | 523 | 15026 | CGCCCGGCCCAGAACTTCATTTTTAAGATAATAAACTGAGGGGCTGAGAC |
| | | | | | | 7044 | |
| | | | | | 524 | 79815 | TCCGAGACCTCAGGGCGCGTGGCAACTGGGCAGAAGCCGTCTCTGCAGCG |
| | | | | | | 718 | |
| | | | | | 525 | 91171 | CGCTTTAAAGTGGCTACAGCTCTGATGCACCCTACTTCCAGTGGGAAACT |
| | | | | | | 013 | |
| | | | | | 526 | 15830 | CTTTCCTAGGTGCAATTGGACACTAAGGGTCTGGGTCTTTCTGTCTCCCG |
| | | | | | | 1038 | |
| | | | | | 527 | 44332 | CGCCCCACGTCTGCGCCCAGGCGAGGGGATTTCCTGCCAGGCGAAGTACA |
| | | | | | | 664 | |
| | | | | | 528 | 57358 | ACAGCTTTTAGGTAGACGTGGAGGCGACTCAGATCGCCTCGCGGTTCCCG |
| | | | | | | 713 | |
| | | | | | 529 | 27015 | GAGGAGTTCCAGTCACCGAGCGAGGGGCGCAAGGGTGGGTGCATCCTGCG |
| | | | | | | 872 | |
| | | | | | 530 | 36604 | GTAATAAACACCAGATTCCATGCGTGAGTTTTCTGTGTTTATTTGCCTCG |
| | | | | | | 588 | |
| | | | | | 531 | 14022 | CGGCCTTTAGAGACAGATGCTGTCAGAGAAAAGACTTTGAACATTGACCA |
| | | | | | | 0803 | |
| | | | | | 532 | 12268 | CGGCGCAGACTCTCCCAGCTGGCACCAAAGCCTTCCGCTTCGCCGAGATC |
| | | | | | | 6453 | |
| | | | | | 533 | 30572 | CGGCCACCTAGACGCGCTCAGCGGCGCCCGCCCCACCCGGATCCCCGAAA |
| | | | | | | 739 | |
| | | | | | 534 | 75315 | CGCTCCCTCCCAGGGGACGGCTAGAGACTCACTGACTCATGCGTGTGTGG |
| | | | | | | 486 | |
| | | | | | 535 | 79083 | CGCGCTGACTCCCTCCGACCTGGGCTCCGATGGAGCAGAAATAGCGGGAC |
| | | | | | | 445 | |
| | | | | | 536 | 87908 | CGCTCCCCAAGTCTCTCTCGTGCGCAGAGCCCAGGCTGCGCTTCCCTGGT |
| | | | | | | 631 | |
| | | | | | 537 | 39755 | GGAGCCCCTGGCAGCCGCGGGGAGGGACGTGGCGGCCTGCGTGAGTGACG |
| | | | | | | 901 | |
| | | | | | 538 | 38036 | GGAGCCGTGGAGGCGGTGCCTTGGCTGGGGCAGTCTTGGGATGGCCATCG |
| | | | | | | 034 | |
| | | | | | 539 | 10005 | GAAAATCGAATTGAGTGCGGGCTCATTCGGCAGCGGCCGGCAGAGAAGCG |
| | | | | | | 0812 | |
| | | | | | 540 | 56304 | TCTCTCTGCCCTTGCGCTACTTTTTTTCTCCAAGGAAGGTTGTGCCTGCG |
| | | | | | | 28 | |
| | | | | | 541 | 22315 | CGATCACGTGAATAGGAGTGTGGCCGCTAAATCCGAATGGCTTCAGCATC |
| | | | | | | 4140 | |
| | | | | | 542 | 13421 | ACCCAGGGCAGGGTGGTCTTGAGTCTGGAGAAGGCCTTGCTCAGCACTCG |
| | | | | | | 0812 | |
| | | | | | 543 | 51184 | TGGAGAGTGCTGCTGGCCGCCAGTTGTTCCGGAGACGGTGCAAACGGACG |
| | | | | | | 379 | |
| | | | | | 544 | 52536 | GTTGCAGGAGATGAGCTCAGCGCAAAGGGAACCCCGCAGCGGCGAGTGCG |
| | | | | | | 175 | |
| | | | | | 545 | 39737 | CGCCCCCTCTGGCAGCACGGAAACCTCCACGCCATTGGCTGCCGAAAGCA |
| | | | | | | 768 | |
| | | | | | 546 | 29229 | CGCCTAGAATCAAGGCCTCTGGCTCGATTGCGTTCGGCAAGCGTCTGCAA |
| | | | | | | 249 | |
| | | | | | 547 | 72529 | CGGGCGCTTTCATGTCACTGCGGGTTTAGAGCTGATTCAAACTCATTGCG |
| | | | | | | 902 | |
| | | | | | 548 | 65027 | CGCGGTTACTGCAAGGATTCTGGCGAATGAGGTCTAAATAGAATGAGAAG |
| | | | | | | 63 | |
| | | | | | 549 | 14712 | CGCAGGCTCCAGCGCCCGCCAGGCAGATTCTGCCGGCCCGGCTCGCACTT |
| | | | | | | 7662 | |
| | | | | | 550 | 10274 | CAGGAAGCCAAGTTGGTAATCCCTTTCTTCTGGTCGCCTTGCTCACCGCG |
| | | | | | | 315 | |
| | | | | | 551 | 86331 | AACTCAACATGGCCTAAATGCATATCAGAAACTCAACATGGCCGGGCACG |
| | | | | | | 859 | |
| | | | | | 552 | 51522 | CGCCCCAGCTACCCTGGCTGCAGCCACGCCGCGCCCGAGGTTTCCCCCTC |
| | | | | | | 641 | |
| | | | | | 553 | 17699 | CGGGCCGCTCTGGTCACGCCCCTGACCCGCCCCTCAAGACCTGGCCTTAG |
| | | | | | | 746 | |
| | | | | | 554 | 38069 | GTAGAGCGGGAAAGCCCGAGGATCCTTTCAGCAGCACAGAGCAGAGACCG |
| | | | | | | 206 | |
| | | | | | 555 | 15525 | CGGCGAATCCCCGCTTTAGGAATTGCACCTTGGCCCTTTGTCGTCAGTCG |
| | | | | | | 9845 | |
| | | | | | 556 | 96632 | CGCGGGCAGCGAGCTTCAGGTCTTCTGATACATTGAAGGAAAGAAAGAAA |
| | | | | | | 841 | |
| | | | | | 557 | 47074 | CGCCGCGGGCACTTCTCCTGGGCTCTCCCCGAACTCTCCCGCGACCTCTG |
| | | | | | | 883 | |
| | | | | | 558 | 57618 | AAGGCGGCGCGCGCCAAAAAGATCTTCGGCTGGGGGGACTTCTACTTTCG |
| | | | | | | 943 | |
| | | | | | 559 | 17216 | GTGATATCAAGTGTCAGGGACCACCGGAGGCACTCAATAAATAGAAGACG |
| | | | | | | 7445 | |
| | | | | | 560 | 10089 | GAAAGAATAAGGCTCAAATGCAGGCCTCTGCAGCCTCCCTGTCATTCGCG |
| | | | | | | 4513 | |
| | | | | | 561 | 19789 | AGTGGTCGCAGTGCCGGGTGGAGTGAGAGCTCCGCTGTCTGCTGAGGGCG |
| | | | | | | 8229 | |
| | | | | | 562 | 18145 | GAGGAATGGAGCTTCGCAGAGGTTGCATTTAGATTCAACAGTTCACAGCG |
| | | | | | | 2707 | |
| | | | | | 563 | 49813 | GAATGGCAGCCCTGGCAGGGTCTGCGGCCGGCTGCGGAGGTGGGGACGCG |
| | | | | | | 033 | |
| | | | | | 564 | 72761 | CGGAGGGAAGGGTAAAAAATCTTGCTGCAATCCTTAGATAAATAAACCAG |
| | | | | | | 320 | |
| | | | | | 565 | 67766 | CGAGCCCTCCTGGCATCTGCACAGGCGGCCCCGCCCATCCCCGCTAGGAG |
| | | | | | | 4 | |
| | | | | | 566 | 62360 | CGGCCTGTTGAAAGTGCTGGAGCGTCTTTGAGCAGTTTGTTGTGATACGC |
| | | | | | | 464 | |
| | | | | | 567 | 78084 | CGCCAAAAAAGAATAAGTGCCTCCCAAACAACTGAATATAGGAGCTGTGT |
| | | | | | | 695 | |
| | | | | | 568 | 95239 | GCCTCCGCGCGGCTGCAGATTGAAGGGGCAACCCGATGGGGGAGGTCCCG |
| | | | | | | 381 | |
| | | | | | 569 | 17702 | GCGGCGGGGAGGCCGCCTTGCCGGGGTGCATGAGGCTGCGGAGTACTCCG |
| | | | | | | 4947 | |
| | | | | | 570 | 54423 | CGGCGACTAGTCGGTGCATGCTTTCTAGTACCTCCGCACGTGGTCCCCAG |
| | | | | | | 845 | |
| | | | | | 571 | 26663 | ACTTTAACCTGCAGCCGAAATGGAGTCTATAGGCCCCTTAAAAAAGCGCG |
| | | | | | | 593 | |
| | | | | | 572 | 97685 | CGGTCCCGATGACCAGGCCTCTTTAGGGTCCTGGCTCAGGCTGCCTTTGT |
| | | | | | | 274 | |
| | | | | | 573 | 30218 | GAACCCCAGGATAGAAGTTTTGTAGCCTATTCAGGTTGGAATATATGCCG |
| | | | | | | 600 | |
| | | | | | 574 | 14627 | CGGCTTCCATCTGAGCCCTATAGTCTCCAAACAAGGAGTGCATCAGCTGC |
| | | | | | | 8795 | |
| | | | | | 575 | 15032 | CGCAGTCACTGTGGTACAGTCCACATTCCGGCTCAGCGCCTGGCGAGTCC |
| | | | | | | 6174 | |
| | | | | | 576 | 74891 | GCCTGACTGGCTTCGGTTACTTCGCACAAAAAGCCCTTGCCGAGCAAACG |
| | | | | | | 207 | |
| | | | | | 577 | 14942 | CGCGTCTTGACATAAATCAAGGACTAAGAGAGACTGAAGAAGAGCGTTAG |
| | | | | | | 815 | |
| | | | | | 578 | 41875 | CGCCTTTCCGCAACCTACTGGCTCCGTAGATACAGCCATTCAGCCGGTTA |
| | | | | | | 470 | |
| | | | | | 579 | 89899 | TCCAAATTCCTAGACTCTATGTTACACTGCCTTTTAATAATAGTTCAACG |
| | | | | | | 729 | |
| | | | | | 580 | 66103 | CGCTTCAGGAAGAGAATCCAGTCCCAAGGCAAGGCACGCACATCCCCAGT |
| | | | | | | 889 | |
| | | | | | 581 | 10887 | CGTCATTTAAACGTTCCTTATTTGCGAAATTCCAAACAGATAGGCGTTCG |
| | | | | | | 047 | |
| | | | | | 582 | 21741 | CGCTGTCTGGGTCAACATTTCAGGGAGGAGTCTGCCACCAGTGTAATGTA |
| | | | | | | 492 | |
| | | | | | 583 | 48644 | CGAGACTGAGAGTGTCACAGGGATTGGACTTGACCTCAGACATCTTGACG |
| | | | | | | 408 | |
| | | | | | 584 | 19692 | CCGCGAATGGGGCTCGTGGAGCCTGCAAAGGAGTCTGCCTTTGGTATGCG |
| | | | | | | 172 | |
| | | | | | 585 | 16581 | CGCTGCCCTGCCCCGATCTCACAGAGTTATGACCGCCTCGTTGCAGTCCG |
| | | | | | | 2146 | |
| | | | | | 586 | 12030 | ACAAATGGAATATTAACATGCTCTTAAAGATATCAACAGTTGGTCTCTCG |
| | | | | | | 2922 | |
| | | | | | 587 | 10089 | CGCGCTCCCAGGTGAGTTCAGTGTGGCTGTGCAGTCACTTTCTTAAGACA |
| | | | | | | 6760 | |
| | | | | | 588 | 66327 | TAGGCTCTCCTGGGTTCTGTAACCCCGCCGTGGTACCCAGGTCCCATTCG |
| | | | | | | 000 | |
| | | | | | 589 | 29255 | CGCTATCCATCATCCATGTGACTGGGCGGAAGTGCAGGAGAGCAAGGGGG |
| | | | | | | 119 | |
| | | | | | 590 | 19788 | CGCTGGATACTGTTTTAAGAGCCGCGCCTTTCAAACCGAAGGGGCTCCTT |
| | | | | | | 2836 | |
| | | | | | 591 | 11645 | AATATTGATGCACATCTGTCCCCCGCTCAGGTGTAGAGGGGAGCTTTGCG |
| | | | | | | 1176 | |
| | | | | | 592 | 82763 | CGGCCAATCGCAGCGCGTCTCCGCCTGGCCAGGAGTAAGCCCGGCCAATA |
| | | | | | | 219 | |
| | | | | | 593 | 10848 | CGGGGCTGGAGGCTTCCAAGGCCTCACTCAGGCTCTTGGCAAGTTAGAAC |
| | | | | | | 9795 | |
| | | | | | 594 | 10510 | CGACCACCGTTCCTGCTCCTCTGGCGGGTGTCTTAAATGTGCTCTTGTAT |
| | | | | | | 2977 | |
| | | | | | 595 | 81471 | GCCGGAGGAGATGAAACCGTCTTGGCTGCAGTGTCGTAAAGTCACCAGCG |
| | | | | | | 938 | |
| | | | | | 596 | 35898 | ACTAAAGAAAATCACGTTATATTAGAAGCCTTACCCTGGTTTCACTTTCG |
| | | | | | | 975 | |
| | | | | | 597 | 26240 | ACTTTTGCAACTTTGCTACACACTGAAGCCCCTTATATATCAATTATGCG |
| | | | | | | 579 | |
| | | | | | 598 | 45018 | CGGCAGGTCACGATTTTTAAATGGACATGTCCTTAACTCACGTTGTGGGA |
| | | | | | | 949 | |
| | | | | | 599 | 63107 | CGAAGGCGCCCAGTTGCGAACCCTCCTACAGTCAGGCTGTCTGGAGCCAT |
| | | | | | | 73 | |
| | | | | | 600 | 14009 | CGCCTCCAGACAATTGGAGTGTACAGCCAGGGACACACAGCAGTGACAAG |
| | | | | | | 8392 | |
| | | | | | 601 | 15693 | CTCTCCTAACTGTAGAAATCCTTTGATCTCATAAAACATTTTCATTAACG |
| | | | | | | 3206 | |
| | | | | | 602 | 33170 | TCTGTCTGTGGGACTGTGGGTTCTCAGTGGAATTGTTGCCTTTCTTGTCG |
| | | | | | | 101 | |
| | | | | | 603 | 13141 | CGTGCCACTAACGAACTACAGAAGTATGAATTGACTCAAGGGGGCTGGCA |
| | | | | | | 0879 | |
| | | | | | 604 | 70992 | CCTTCCTAGACCAAGGGGTCATCTACGGCTCTGGACTTCGATAGGACTCG |
| | | | | | | 454 | |
| | | | | | 605 | 33700 | CGTGGCAACAGTCAGAAGGGTGGGAGCTTCTAGGCAATTTAACGCGGCAG |
| | | | | | | 801 | |
| | | | | | 606 | 63005 | CGCCCGCCCAGGAGAAGGCAGCTGCTACCTCTGCCTGCCTCCCGCTGCGC |
| | | | | | | 366 | |
| | | | | | 607 | 14572 | AGGCCTGCGCACGGGGAGGCTGTTGTGGCAGCGGAACAGAGACGTGCACG |
| | | | | | | 8507 | |
| | | | | | 608 | 72596 | CGGGACCACTCCAGCTTGCTACTATGGCCCATTCAAGAAATTGAGTAGGG |
| | | | | | | 351 | |
| | | | | | 609 | 84617 | CGCCACAGTCCAGCTGCCACAGCAGGACCAGCCAGTGCCCCACGGCACCC |
| | | | | | | 9 | |
| | | | | | 610 | 79083 | ACTATATAGATGAAGACATGAAACCTCTCTACACAGTGAACTCCCCCACG |
| | | | | | | 635 | |
| | | | | | 611 | 38892 | CCAAGATCGGTCTCACTGTAAGTCTGCTATCTGTATTTTCCCATTCTTCG |
| | | | | | | 887 | |
| | | | | | 612 | 13414 | CGCTCAAGTGCAGGCCTTTCTAAAGGAGCTGCTCAGCAGGCGGCAGCCCA |
| | | | | | | 3149 | |
| | | | | | 613 | 77122 | GAAAAGCAATCTTCAATGAATTTTAAACAATTATGGAGACTATTTCCTCG |
| | | | | | | 541 | |
| | | | | | 614 | 11184 | CGCCCTGGGGAAGCCCTGCCAGCCTGTTGCTCCGAAAACCGCATACCAGC |
| | | | | | | 7475 | |
| | | | | | 615 | 19749 | ACTCCAGAACTGAACCAGAGTTTTCTTGAGGTGGGATTTACTAGGAGTCG |
| | | | | | | 188 | |
| | | | | | 616 | 17519 | TGTTTCCTAATTTAAGAGGACCTTCGCCGGGCTAGAACGTCAGGGATTCG |
| | | | | | | 1045 | |
| | | | | | 617 | 26797 | CGTCGTCGTCGCCCAGCAGCAAGGGCTGCAAAATAGTAGAACTCGTGGTT |
| | | | | | | 576 | |
| | | | | | 618 | 30573 | GTAGGGTGCAGGAGGTTCCACGGACGCCTCGACGACCGGTAGTAGCTTCG |
| | | | | | | 013 | |
| | | | | | 619 | 11410 | CACAATGACATGTACAATGTCACTGAGAGGAGCTGGCGTTGTTGATTCCG |
| | | | | | | 9729 | |
| | | | | | 620 | 13655 | CGCAACCCTCCAAGCCCCAGGATCCAAAGTTTCCGTTTGAGAATCTGCAC |
| | | | | | | 4352 | |
| | | | | | 621 | 62584 | TTCCCGTTGACTTCGCTGCCTATGTGCAGCTAGGCTGGAAGCAGCAATCG |
| | | | | | | 600 | |
| | | | | | 622 | 22509 | TCGGACCGCGGCAGCAGGAGCAGGGCCGGGGTCATCCGTGTGAAGCAGCG |
| | | | | | | 01 | |
| | | | | | 623 | 30326 | AATACGTAGTAATTTATCCGTTCTCATGTTCTGTACTATCAGCACACACG |
| | | | | | | 592 | |
| | | | | | 624 | 36983 | CGCTTCAGATTGCGTTCTAGGTCTCTTCCCGCAGCTGCGACAATTCCCCC |
| | | | | | | 542 | |
| | | | | | 625 | 99439 | CGCCCACCGAGACCCCTGGGGTGGAGCTGTGCTAATAGAAACATACCCAC |
| | | | | | | 948 | |
| | | | | | 626 | 74826 | CGGTAAAGAAGAAGCTAAATCCTTCCTAGACAGAAGGATCCTGAAGCTGA |
| | | | | | | 447 | |
| | | | | | 627 | 84140 | AGGGCAGCCTGCGAGAAGCGCTGAGTCATGGCAGGAGATCATCCGAGCCG |
| | | | | | | 928 | |
| | | | | | 628 | 20001 | CGCCACTGATTAACTTAAAACAAACTCGGCTGCGTGTTTGTGCGCCGTTG |
| | | | | | | 1684 | |
| | | | | | 629 | 53359 | AAGCCCCTTTACGTCGGGGTGGGATTCCCCTTAAAGCCACTGCCAAGACG |
| | | | | | | 155 | |
| | | | | | 630 | 10475 | CGTCAATTATGGAGGCTTGGGATGTTAAAAGGCCAATATTTTTCAGTTGT |
| | | | | | | 2143 | |
| | | | | | 631 | 26250 | CGGCGCTTTCAACTGAAATTGTTGGTGGCTCTGAAAAGAGCCTTTGGTTT |
| | | | | | | 347 | |
| | | | | | 632 | 25129 | TGGGTGTCTGGGCCGGGGCCCCTCCAAGCCCACCTGGGAGAGCACTCCCG |
| | | | | | | 126 | |
| | | | | | 633 | 11410 | CGCTTCGGCCCCACAGTGCAGTTGTGCCTAAAACAGGTGAGAGTTTGAAC |
| | | | | | | 9420 | |
| | | | | | 634 | 10289 | TTTCTGGATTTTGCGCGGCCTGGCGCTGGGTGCCACAGCCGGTGAATGCG |
| | | | | | | 9285 | |
| | | | | | 635 | 13356 | CGCTACCCAGTTCCCCTGTGCAGGCCACTGCGGGCCCCCTGCCGGACTCC |
| | | | | | | 2035 | |
| | | | | | 636 | 15725 | CCCCAGTCGGGGTGCTGGAGCCCAAGCTGGAAGAGTTGGAGCACAGGACG |
| | | | | | | 652 | |
| | | | | | 637 | 66664 | ACCGAATTCCGGGTGGAAGGACCCAGCTGTATTGACCTTATATAAGCTCG |
| | | | | | | 798 | |
| | | | | | 638 | 89867 | CGGAGGCCACCCAGAGCTCACAGCCTCCTGCCAGCGCGCTCTCTGTTTCT |
| | | | | | | 819 | |
| | | | | | 639 | 24280 | GGATGCTGAGCTGCGCGGGATGCTGAGCTGCGGGGGGATGCTGAGCTGCG |
| | | | | | | 8479 | |
| | | | | | 640 | 17702 | CGGCAGATGCCGTGACAGCGACCATTGTTCCTGGTAGACACAGGCGACCA |
| | | | | | | 2646 | |
| | | | | | 641 | 49057 | AATGACCAGCTTTTAATGTGACTCCTTTAACCTGGTGTGCTTTAACAACG |
| | | | | | | 259 | |
| | | | | | 642 | 17267 | GCTGTTCACAATGCGCTCCGCCGGGCGGTGGAAACTTGGCTGCGGTAACG |
| | | | | | | 1526 | |
| | | | | | 643 | 82303 | GCCACGTCCGGGAGGATGAACGGAGCCCCGCTAAGGTCGGGAGGACTTCG |
| | | | | | | 50 | |
| | | | | | 644 | 18554 | CGGCTAAAATAAATACCCTTGTGAAATCTATAGTTATATTTAAGTGCACT |
| | | | | | | 0331 | |
| | | | | | 645 | 51147 | TCACGGAGGCCGGTAAATATGTAAACGTGGGTTTTTCGGTTTCCGTTTCG |
| | | | | | | 536 | |
| | | | | | 646 | 77983 | CGGTTCCCACCTTTTGCACTATGGACATTAGGAGTCAGATCATTCTTTGC |
| | | | | | | 27 | |
| | | | | | 647 | 63297 | CGTGCTTTGGATTCAGGTTATTTCAGTTTGATTCCAGAACATTTCAGAAA |
| | | | | | | 615 | |
| | | | | | 648 | 25941 | CGCTCTAGTCACAGCAGCCCACCATGCCTGCTCAGGCCTGGGAAGGGGCC |
| | | | | | | 33 | |
| | | | | | 649 | 17030 | CGCGTGGCCACGCAGCCCTAACCTGGCCCTCTTGGATTAGAGGGGAGCTG |
| | | | | | | 2890 | |
| | | | | | 650 | 66410 | AGCCGGCTTAGGACTGCGCCCGGGATGGGAGACCAGAGCGGCTGCTATCG |
| | | | | | | 998 | |
| | | | | | 651 | 13209 | GCCAGTAGTGATAAGCAAGCCTGGGAACCATGAGCTCTCCTTGGATGTCG |
| | | | | | | 0141 | |
| | | | | | 652 | 26598 | ATCTATCTTCTCACCTTGAGGTTCCAAAGATCATAACGGAAGGGGCTGCG |
| | | | | | | 303 | |
| | | | | | 653 | 11784 | GTCGGTTTCAGGACTCCCTCTTTTCAAGCTGCCAGAAACTTGTCTAGTCG |
| | | | | | | 7088 | |
| | | | | | 654 | 55095 | TCTGTTCTACCCACGGCGGCGGAAGCGACGGGGGAACTGAAGACGAGGCG |
| | | | | | | 177 | |
| | | | | | 655 | 12764 | CGGGTCTCCAGGTGTCAGAAAGCCAATCCTTACAAAGTTGAGTGATCCAA |
| | | | | | | 6592 | |
| | | | | | 656 | 10547 | GGCCGCCGGGCTCCGGATTTGCAGCCTGAGGCAGAGCTCGGGGGCTGTCG |
| | | | | | | 9248 | |
| | | | | | 657 | 71800 | CGGATCCCACCCCCACCTGGGCGCCAGACCCATCCAGCTGCTTGGAGCTC |
| | | | | | | 987 | |
| | | | | | 658 | 33258 | TGCTTGTCTCCCTTGTCTCTCCTTAGTAAGCGATACGAATCCCAGCTTCG |
| | | | | | | 515 | |
| | | | | | 659 | 53243 | GTAGGAAAGTTTTCAGGGCTCATTACTCGTGGAATATTGCGTTCCCCACG |
| | | | | | | 559 | |
| | | | | | 660 | 89744 | CGGGGGCCTGCGGATCAGCTCTGACTCTTCCTCGGACATCGAGTCTGACC |
| | | | | | | 701 | |
| | | | | | 661 | 76033 | AAAGGCGTTTTCTGCCCCCTCCGGGCCTCGGGAATATTTGTGGGCTGCCG |
| | | | | | | 097 | |
| | | | | | 662 | 11912 | TGCTTTATCCTGAGCTTGGTGGACCAGTTTCCTAGTAGGTGGGGTTGCCG |
| | | | | | | 1281 | |
| | | | | | 663 | 29396 | GCCTCCAGCTGGGTCTGTGCGCGCGGCAGAGATGCTGGGCGTGGGAACCG |
| | | | | | | 200 | |
| | | | | | 664 | 13529 | CGCCACTGCTGAGCGGTTGGAAGGGGAACACTGCAGGTACGCCCCAGTCA |
| | | | | | | 809 | |
| | | | | | 665 | 10531 | GTAGTAGATGTTTCCTGGCTCCTGGATGAGGGCCCTGGCCAGTCAGAACG |
| | | | | | | 9615 | |
| | | | | | 666 | 55401 | CACCACGCAAGGACTCGGGAAGCGGGCAAGTGGGCAAAACTCTGCTTCCG |
| | | | | | | 16 | |
| | | | | | 667 | 77719 | TGGGCATCTCGGCGTGGCCTGCGCCGGGGTCACGGGGAGGGCTGTCAGCG |
| | | | | | | 408 | |
| | | | | | 668 | 45429 | AAGGGCATGATAACTGCTTAAGTATCCACGTCTCTCATTTAAGACTTTCG |
| | | | | | | 449 | |
| | | | | | 669 | 81186 | CGCGCTGGATTTCAACCTCAGGAAACCCGAGAAGGGAAAATTTCCTTGAG |
| | | | | | | 795 | |
| | | | | | 670 | 89251 | CGGGCCCCTCACGCCCTACTTGCACCAGACCCCTCCCACCCGGGCCAGCG |
| | | | | | | 975 | |
| | | | | | 671 | 51385 | CGGGTCTACGCACCTAGGACCCGCTCGCCCTCCTCACGTGCCCACAGCTC |
| | | | | | | 916 | |
| | | | | | 672 | 18771 | GTTGCCTTGGTGACGGTGGTTGGGCTCGGGGTGTCCCGGTGTGCCCTGCG |
| | | | | | | 3986 | |
| | | | | | 673 | 49008 | CAGGAATGGAGTGTCCCCCAGCCCTGCAATTCCGTGGAGCGCTGAACACG |
| | | | | | | 322 | |
| | | | | | 674 | 50194 | CTGCCCGCGGCCCCTCCTGACTGCTAGTTGGAGCGGGGACAGCATGGGCG |
| | | | | | | 52 | |
| | | | | | 675 | 19788 | TTGCTACGAATTGGGCAAGTTCTGCGCCTTGAAACTGAACTAGTGGCTCG |
| | | | | | | 9693 | |
| | | | | | 676 | 63795 | GCTCCGCGGCGGGTGCCTTTCACACCTGGGTTTCCTTCGTAATTAATTCG |
| | | | | | | 711 | |
| | | | | | 677 | 19615 | TGGCTTCGTACCGGTGACTCGCGTCTTGGAGATTTTAACACTCCTCAACG |
| | | | | | | 480 | |
| | | | | | 678 | 17030 | CGCCCTGGGCCTCCGCGCCATATTCCTGGTCCCCCGCTCCCGGTGACTCC |
| | | | | | | 3540 | |
| | | | | | 679 | 11953 | TCGAGACGGTTCTATCCTTTTGCAAAGAAGCCGGAAAGAGCTGGGTCCCG |
| | | | | | | 2189 | |
| | | | | | 680 | 11884 | CGCCTGTGAGGGTCGCTCCTCAGCCGCCGCGCTCCCACTCCGCGTCCCCA |
| | | | | | | 2484 | |
| | | | | | 681 | 24197 | CGGCCATGTTCTAACCTGTACCACTGGGTGGAGGGAGAGCAAATCCTTTA |
| | | | | | | 863 | |
| | | | | | 682 | 80545 | CTGGTGTTGACCTAGAGGTGCCTGTTGTACTATGGTCACCGTCTGGACCG |
| | | | | | | 020 | |
| | | | | | 683 | 32115 | CGCCGCCAGCCAGCCAAAGCTCTCTCTACACTGGATCCCGGCCCCGTTTC |
| | | | | | | 19 | |
| | | | | | 684 | 73636 | CTGACAAACTTGTTCTGCGGGCTGCGGATGGGTGCGAGGGTGGAATCTCG |
| | | | | | | 184 | |
| | | | | | 685 | 31020 | GGAGAAGGCGGAGCGGGGGCGGCCTGGAGCGCTGATCGGGCGCCGAAAC |
| | | | | | | 806 | G |
| | | | | | 686 | 11372 | CTGAGGTCGGGTGTCAGGGCGCGTTGCGGCCTCGCGGGTGGGCAGAGGCG |
| | | | | | | 7753 | |
| | | | | | 687 | 17074 | CGCTCCCGCCGTCACCTCCACCTCCAAGCCCAGCTAGCCTGGGATCTGCG |
| | | | | | | 0673 | |
| | | | | | 688 | 27765 | CGGCCCCGCTCTTGAATCTATCTGAGGAAACGCAGCGAAGAAACAAGCAG |
| | | | | | | 232 | |
| | | | | | 689 | 24270 | CGGCGGCCTGCACCCGGAACTCACGCTGCCTCGGGTCCCAAAGGCTGAGA |
| | | | | | | 2553 | |
| | | | | | 690 | 69136 | GGAGGACAGGCGGCTCTGCGCTGCGGCTGTGGTGGGCTCCGTGCACACCG |
| | | | | | | 313 | |
| | | | | | 691 | 10184 | GAGCAGGTCTGACATCTTGCTGGGCTTTTTCAAAGAGAGCCACTGAAACG |
| | | | | | | 1416 | |
| | | | | | 692 | 32120 | CGGCTTCACACCAGTCGTTCTGGTCACTTAGGCGTTCGCGTGAGCGCTCA |
| | | | | | | 863 | |
| | | | | | 693 | 18101 | CGGCCAGACTGTTTTCAGAGTAGCTGATCCTTAAGTCACTGTATGCTTGC |
| | | | | | | 0312 | |
| | | | | | 694 | 50219 | CGCGTCATTACTGAGGTGGGGCAGAAGCAACAGTTGGTTACTCACCAGAT |
| | | | | | | 754 | |
| | | | | | 695 | 48690 | CGCTCGCGCTCTGCTCCGCGCCCGCCTTGACCCTGCCGCCCTCGCAGCCC |
| | | | | | | 457 | |
| | | | | | 696 | 14756 | CGGTGCCCATCTCGCACCCTTCCGCGTTGGCGGGCACGCACCACCACCAC |
| | | | | | | 1203 | |
| | | | | | 697 | 47695 | TGCAGGTTGGGGGCGGAAAGCTGTTTGCGATTCCCTGGACTGGTTGGTCG |
| | | | | | | 138 | |
| | | | | | 698 | 22904 | AGGATAAGTCTGTGGTGCTAGGACCCAGCTCCCAGAGTGCCAGACTGGCG |
| | | | | | | 6406 | |
| | | | | | 699 | 50817 | GCTCCAGGGAGACTCACCTTCCTTCTGAGAGGGCCGCACCCCTTGAGGCG |
| | | | | | | 213 | |
| | | | | | 700 | 22201 | CTCAGTATTCCTGCTGGCATTGTGACATGATTGAGCATGGCTCTTGTTCG |
| | | | | | | 921 | |
| | | | | | 701 | 10546 | GCGCAGCTCTCCGTGCCGGCGTCCCGGGATTTGTATTGCATGCATGTACG |
| | | | | | | 1368 | |
| | | | | | 702 | 17442 | AAAGTGGGGAAACCCAGAGGCGGGAGGCTCCCAGTGGCTGGGCAAGAGC |
| | | | | | | 2191 | G |
| | | | | | 703 | 11380 | TCAGGGGCGCTGGGGGCGCCACACCAGGTAAGGGGTCCAGCTTGGGAGCG |
| | | | | | | 0909 | |
| | | | | | 704 | 23287 | GCAGTCGGGAGACTGAGGGTTAGGGCGCGGCCGCGGGGTCTCCTGGGCCG |
| | | | | | | 352 | |
| | | | | | 705 | 47034 | CGCGTGTGCCCACACCTGTTTTCCCAGGCAGTCCCCTGAAAGGGGTGGTG |
| | | | | | | 267 | |
| | | | | | 706 | 35396 | CGGATCCATCCTCAATGTCCAGGCAGGACTCTCACATGAAGCCGGTGCTG |
| | | | | | | 475 | |
| | | | | | 707 | 76540 | GGGTCTGTGGCGGCGCAGCTTACACCGCGGTCCCCTTATTTGGATCTGCG |
| | | | | | | 438 | |
| | | | | | 708 | 34392 | CGCTGTGTGGAAACTCCGGTAAAACTCTTTGGGCAACAGTCTTATCACCA |
| | | | | | | 851 | |
| | | | | | 709 | 10094 | CGAAGTGTTCAGAATCCCCGTGCATTCCAGCGCGTTGACACTGAAGTCAC |
| | | | | | | 247 | |
| | | | | | 710 | 13908 | CGGGGCCCTGTCTGGGGTCTCTGGGAGAGTCACCCCCAACTTCCTGCCCC |
| | | | | | | 9315 | |
| | | | | | 711 | 12589 | CGCTCCCGCCATAGTCCCACCACCGGTGAGCGCCGCCCCCACTCGGCTGA |
| | | | | | | 9547 | |
| | | | | | 712 | 14937 | ACTTTAAATAAAAGGCTGATCTGACCTTCTTTTTGCAGAAGATGAATCCG |
| | | | | | | 5085 | |
| | | | | | 713 | 26250 | CTTAAACCAAAGGCTCTTTTCAGAGCCACCAACAATTTCAGTTGAAAGCG |
| | | | | | | 350 | |
| | | | | | 714 | 77870 | CGCCCTGGATAGCGACTTCAGAGAAGGAGCAGAACACGTATTCAGAGATA |
| | | | | | | 9 | |
| | | | | | 715 | 33297 | AATTGAGTGCGTGCACACTCAGTAAATGCGAAATGGTTTCATCACAACCG |
| | | | | | | 65 | |
| | | | | | 716 | 96889 | TTGATGGCGGCCGCGAACTTGGCTGCAGCGGCAGATCTCCGACCAAATCG |
| | | | | | | 169 | |
| | | | | | 717 | 18891 | CGCGGTCTAATCAGGCTACAGCCACCCATCAGCTCCGCCAGGGTTAGGGA |
| | | | | | | 6867 | |
| | | | | | 718 | 13959 | CGCGGCCCAGGAACAGCTAACGTGCCGCTTGCTGCTTGCCAGGTATGGAG |
| | | | | | | 3371 | |
| | | | | | 719 | 38724 | TTACTGAATTGTCTTGTTCAGGGACAAGTGGTGTCTCTCCCAGCTTCTCG |
| | | | | | | 255 | |
| | | | | | 720 | 64008 | CTTTGTCACCTATCCGGCAGAGGTACTCGGCCTTTGCCATCATTGCATCG |
| | | | | | | 041 | |
| | | | | | 721 | 65158 | CCAGATCATCCTATTACCATCACCATGCCTCATTAGAGTGGGGACTTTCG |
| | | | | | | 052 | |
| | | | | | 722 | 13421 | CGCCTGAAGGAAGCCCGGCGGACTCTGAAGAATGCTGCTGGCAACCAGCG |
| | | | | | | 7401 | |
| | | | | | 723 | 17330 | CGGCCGAAGCACCAGCGATTTCTACTTGGGCTTTTCCGCTCTACATGCAG |
| | | | | | | 3193 | |
| | | | | | 724 | 16491 | CGGTCCAAGTCTTTCAGGCTGTCTGAGCTCTTATTCGGGACACCCAGGCA |
| | | | | | | 1348 | |
| | | | | | 725 | 27173 | GACGTATAAGGCAGTCCAGGCCCTTCAGGCAAAGCCCTCTTAGTTAAGCG |
| | | | | | | 991 | |
| | | | | | 726 | 21323 | TCCTCAGGTCTGCCCAAGCAGCTTGTAGCTAGCACTGGGCCCCGTGCGCG |
| | | | | | | 15 | |
| | | | | | 727 | 38035 | CGCGGAAGCCCCTGCCTAGCGTCTCCCCATGGCCCTTGGTACATCCTCCC |
| | | | | | | 642 | |
| | | | | | 728 | 11949 | CGCTGACCCCAGCAGAGACCCTGGCTCTGAGCGAGTTCCCAGCTCTGTGA |
| | | | | | | 4494 | |
| | | | | | 729 | 19787 | GCCGTCCATCCATTCGATGGCCTCGCTGATGAGCATAGAAGATGAACCCG |
| | | | | | | 9766 | |
| | | | | | 730 | 44098 | CGCGGGCGGGCTGCCACATGAGGTCATTTCACAATCCCCCAGGATCAGGT |
| | | | | | | 287 | |
| | | | | | 731 | 35297 | AGCCAGCACCCCTGAGTGTCACTGAAGTTCCTGGATGGGGTGTGAGTGCG |
| | | | | | | 699 | |
| | | | | | 732 | 55443 | CGCCCCAGGCTCCGCCATGGGGAATGTGCCATCCGCGGTGAAGCACTGCC |
| | | | | | | 868 | |
| | | | | | 733 | 30526 | CGGGGCCGCAGGGGAGGCACTGCGGGGACGGGCGGGGTGAGCGGGAGCC |
| | | | | | | 92 | G |
| | | | | | 734 | 25907 | GGGTGACTTTCACGTGAAGCCCCTGCTGGGGGCCTTGCTGGGGTAAATCG |
| | | | | | | 218 | |
| | | | | | 735 | 15725 | AAAAGCGACAGCTCAGGTAAGGGCGCGCCAGGCACCCTCGAGAGTGCGCG |
| | | | | | | 477 | |
| | | | | | 736 | 62476 | CGCCGCGTCCACGATGGCTTCTTGCTCTGGAGCCCACCCTGCTTTGGCTC |
| | | | | | | 40 | |
| | | | | | 737 | 12924 | CGCAGACCTATGATGTGGAGAACTGGATCGCCAAAATAGAGACCTCTTGG |
| | | | | | | 3872 | |
| | | | | | 738 | 15306 | CGGCCCTGCCTCATAGCACGGATCAGCTGGGGACCCATGCGCTCTTCCTG |
| | | | | | | 1818 | |
| | | | | | 739 | 20669 | AGGACCCGGGAAGCAGGTGGGCGGACCACGCGGGGCTGAGAGGATCACC |
| | | | | | | 975 | G |
| | | | | | 740 | 84503 | TGGGATTTACTACAGGGGACCAAATGATACATTCAACCATATTATCAACG |
| | | | | | | 836 | |
| | | | | | 741 | 15090 | GCCTGCCATCGCCATGGTGACAGCTTCAGAGGCTGGAACAAGCTTAGGCG |
| | | | | | | 5602 | |
| | | | | | 742 | 28175 | GGCAGCTTTCCTGGGATATCACACCATATAGACTGAGAATTTCAGAAACG |
| | | | | | | 283 | |
| | | | | | 743 | 51147 | CGGCCCTTTGTGGCCCAGATCAAAGGACCCGAGCGCCACAAAGGCGGCCC |
| | | | | | | 902 | |
| | | | | | 744 | 15358 | TCTTTCTTTATTGGTAGCGGCCAAAAAGAGTTGATTGCTATTGGGATCCG |
| | | | | | | 4582 | |
| | | | | | 745 | 10886 | CGTCATTTAAACGTTCCTTATTTGCGAAATTCCAAACAGATAGGCGTTCG |
| | | | | | | 999 | |
| | | | | | 746 | 10299 | CGGGTGGAAGATCCCCCGCCCACCAGTATCCTGGATTTACCCAGGTCGAG |
| | | | | | | 6310 | |
| | | | | | 747 | 13290 | CAGTTGCCCTTTGTGTGCCTCAGTTTCCTCACATGGAACGTTAGATGACG |
| | | | | | | 8454 | |
| | | | | | 748 | 46387 | CGGCCCCTGCGGCTCTCTGTGGCCCACCCCCGCGAGCCCCATCCCGGAAC |
| | | | | | | 962 | |
| | | | | | 749 | 59287 | CCAAAGACTGTATGGTCTGTTATCTAACTGGTAGCCTTATTTGACCAACG |
| | | | | | | 786 | |
| | | | | | 750 | 61472 | AAGCAAGTGACAAGGACGCCCGAAGCACAGTGGACGGTCATGAAGGAGC |
| | | | | | | 147 | G |
| | | | | | 751 | 17513 | CGCTCACACGGTGTCTACCGGATCTGGCACGGTCAAGACACAGGAACAGC |
| | | | | | | 2842 | |
| | | | | | 752 | 10044 | CGCTCCTAGAAAAGAGCACGACGCACCCGATGCTCGGATTGGATGAAGTG |
| | | | | | | 2105 | |
| | | | | | 753 | 37395 | CGCTGCGGAGCGTTTTCGACTTTGCAAAGCTGTTGATGTTGGTGGGTCCA |
| | | | | | | 115 | |
| | | | | | 754 | 57261 | CTCCTCCGGTAGTCTCTCTGGACTCTCCAAGTGACTTGCTGGGGGCACCG |
| | | | | | | 601 | |
| | | | | | 755 | 50890 | CGCCTGGCACGACTACTGGGCCGCGTCTTGTCAGTCTATCAGCTTCTGAG |
| | | | | | | 678 | |
| | | | | | 756 | 13663 | CGCCATGCCCGAGCTACTCGCACTGCCTTGGTCCCATTCGGTTCCCCGGG |
| | | | | | | 3004 | |
| | | | | | 757 | 21689 | GAAATTTAGAGGCCAGGCCTCGCATGGGGATAATGGATGGGCACAGGACG |
| | | | | | | 759 | |
| | | | | | 758 | 47009 | CGCCTGGAAACCCAGCCGCGTGGGAGAGGGCGACCCCACCTCCAACCCCC |
| | | | | | | 707 | |
| | | | | | 759 | 19788 | CGGCACCAATAGCCCTGAAAATTAGGGAACAGCAGGGGCTGCCAAATATA |
| | | | | | | 8512 | |
| | | | | | 760 | 31819 | TGGGTGCCGTTCACCTTCCAGCCTAATCCGTGAGAAAGCGAGTGAAAGCG |
| | | | | | | 464 | |
| | | | | | 761 | 72275 | CGGAATGGTGCTTTCATTTACATATTAGCAATATAAAGTTATGATTGTGT |
| | | | | | | 551 | |
| | | | | | 762 | 11565 | CGGAAGCTGATGTAGGAGCAGCTGAATTCACCCCAGGGCCTGAAGGTCCG |
| | | | | | | 530 | |
| | | | | | 763 | 37123 | AACAAGGGCGAGGTTCCTGGAGCCCAAACTCAGGCCTCAGCCACCCTTCG |
| | | | | | | 949 | |
| | | | | | 764 | 66715 | CGCCCGCGAGACCAGCCTCGGCCACTGGCCTCCCAGGGCCAAGACCCACG |
| | | | | | | 7 | |
| | | | | | 765 | 10886 | TCTCGCTGCAGTTCATGGCTTTCGGGGAGTGACACGGCGGCTCCAGGACG |
| | | | | | | 8282 | |
| | | | | | 766 | 14376 | CGCCCTCGGAGGACGCATCCTAATCACCTCGGCAAAGAGCCGAGCCAGGC |
| | | | | | | 770 | |
| | | | | | 767 | 27958 | CGGCCCGGCCTGGGGACACACTCCCGCGCCCTCCAGGCCCCTGAGCTGTT |
| | | | | | | 421 | |
| | | | | | 768 | 46916 | CGCCCCCAGGCAGGCCGCCACCCAGCTCCAGGCTGACCTTGACGCGCCGC |
| | | | | | | 741 | |
| | | | | | 769 | 96959 | GCAAAGTCTCCAAAAAGGTTACAAGGGTTCCAGCGCCTCCCCAAGTCACG |
| | | | | | | 633 | |
| | | | | | 770 | 25090 | AGTCATTAACTGGCTGTCAGGTTCCTCAGATGATGGAGCTAAAAATAGCG |
| | | | | | | 198 | |
| | | | | | 771 | 11828 | CGGCTCCCTCAGCAGCACCATGGCTAGCTTTCATGCTTGCCTCAAGATTT |
| | | | | | | 4952 | |
| | | | | | 772 | 56258 | CGGGGTACCTCGCGCCCCACGCGAGTCAGAACCTAAAGTGCTCTCTGGGC |
| | | | | | | 973 | |
| | | | | | 773 | 52535 | CACATCTGGTTCTCGTTAACTTTTCTAAGGCAGCGGCCGCTGGAGCAGCG |
| | | | | | | 964 | |
| | | | | | 774 | 85482 | CGCTTTGGCTGGGTTAATTTTTGTCGATTGTTCCTCATCACACTCAGATA |
| | | | | | | 570 | |
| | | | | | 775 | 73641 | GCGCGTTGGAGGGGCGCCTCGGACCGGGAGGTATGGGGTCGGTGGCAGCG |
| | | | | | | 955 | |
| | | | | | 776 | 15429 | CGCCATCAGGAGTCAGGAGTCTGGATATGGACCAGGAAAGTTGTTCTACC |
| | | | | | | 955 | |
| | | | | | 777 | 55888 | TCACTGAGGTGGCGCTGAAACAGCTGACGGAGCGAAGCCTGACCCAGTCG |
| | | | | | | 548 | |
| | | | | | 778 | 66673 | CTAGGCGTCGAGGCGAGGGTTGAGCCTGTTTGGCTTCAGAGAACGATGCG |
| | | | | | | 316 | |
| | | | | | 779 | 84140 | CGGCCGGAGCCCTTGGCTCCATAGGGCCTCTGCCCACCATGGGCTTATGA |
| | | | | | | 993 | |
| | | | | | 780 | 32461 | CGTCTGTTCTGATGCCACCGCGAGATGGTCCCCGAGCTCCCCGAGAGTCC |
| | | | | | | 240 | |
| | | | | | 781 | 13664 | TCCTTGGACTGATAAAGTCAATCACTCACTCCTCGCACATAAACCGAGCG |
| | | | | | | 8249 | |
| | | | | | 782 | 13702 | AGTGGCACAGGGTGAAGGCAAACTCGATCGAAGAGCCCTCCGAGAAATCG |
| | | | | | | 8165 | |
| | | | | | 783 | 22316 | CGCAATTTGTCCATTCGAAATTGTCTCGAAGTTGTCTCGAAATTGTCCCG |
| | | | | | | 2881 | |
| | | | | | 784 | 10511 | CGGCCACCTACCACCCCTGTCCCCTGAAGATAAATGATCGCAGCTGCAAA |
| | | | | | | 4327 | |
| | | | | | 785 | 15666 | CCGGTCCTGATTGGGGGCGGGGGCGGGGAGCTCGGAGACCCAAAGGTTCG |
| | | | | | | 99 | |
| | | | | | 786 | 10715 | AGGGTGGGCTGGCTGGGAAGGATGGCAATGCCCATTGCTGACATCCGCCG |
| | | | | | | 612 | |
| | | | | | 787 | 25964 | CGGCACTCCCACTCCCACACCTGTGCAAACATCCGCCCGCTGGCCGGGAA |
| | | | | | | 16 | |
| | | | | | 788 | 13176 | CCATTTTTTCACTGGGCCTAATTCTTGACAATGGTTCTGATTCTCATTCG |
| | | | | | | 1763 | |
| | | | | | 789 | 90357 | CGCCCCACTTGCCTGGGCCGCCGGGCGCTGGAACCTGGACCCTGGACCCT |
| | | | | | | 992 | |
| | | | | | 790 | 28838 | TTTAAGTTTTTCCTTCATGATATGCCTGGAGCCCCAGGGGTGACAGCTCG |
| | | | | | | 631 | |
| | | | | | 791 | 13865 | CGGGGAAAGGTTTTTTAAAACTCGGTTTCATACTATTATTATTACTAAGG |
| | | | | | | 8243 | |
| | | | | | 792 | 79093 | GCTCCCGGGTGGGGCTTTCCTGGAGGAATCAGAGAGCACCAGGTAGCTCG |
| | | | | | | 913 | |
| | | | | | 793 | 97004 | CGGACTGGCAGTGTGCTGCTCTTCAAAGTAAGAGCTAGTGCTATAATTAT |
| | | | | | | 302 | |
| | | | | | 794 | 87138 | GAGGGAACGTGTGGGTCTGCCAGGGTCCTGCAGGGGGGATGAGACCCTCG |
| | | | | | | 510 | |
| | | | | | 795 | 27199 | TTGCTTTTGCGTTTTGCCTCTGGAACCATTCGACATCCGTGGCTGATGCG |
| | | | | | | 815 | |
| | | | | | 796 | 11540 | CGGAGTAGTTCTAAGAGGGTAACTGTTAGATTCTGTGTCAACCTCTGAGA |
| | | | | | | 407 | |
| | | | | | 797 | 29855 | GAGAATCTGAGTCCCGGTGGGTGCGTGGGGACTTTAGAACCGGGACCGCG |
| | | | | | | 465 | |
| | | | | | 798 | 34419 | CGGAGTCCGTTGTATGTCGACTTCCCAGGGCCGTAAGCGAACTTTGTTTT |
| | | | | | | 546 | |
| | | | | | 799 | 10456 | CGCCCCCATGCGGCCTGCAAGACACAGCCGGGCCTCCATCTCTGCAGGAC |
| | | | | | | 9519 | |
| | | | | | 800 | 12589 | CGCTGCGCTCCCGCCATAGTCCCACCACCGGTGAGCGCCGCCCCCACTCG |
| | | | | | | 9552 | |
| | | | | | 801 | 51410 | CGCCGAACTCATGTCTCCGAGGTGCCACCCGCCAGTGTCCCGCCCAAACC |
| | | | | | | 689 | |
| | | | | | 802 | 15950 | AGTTAAGCCAGTTGGGCTACAGATAGCTGCAGATTTCTCTCTCAACTCCG |
| | | | | | | 6621 | |
| | | | | | 803 | 11270 | CGGCTCGGGCAATCCTGCGCTAAAGCCCGCTCCCCCCGCCGCCAGCAACG |
| | | | | | | 9384 | |
| | | | | | 804 | 12853 | CGCCCGCCACCAGGAGTACTTCTCCCCGCCCGGCGATCCCTGCCGCCGCT |
| | | | | | | 1106 | |
| | | | | | 805 | 10128 | CGGGAACCATGACTCCACGGCCATCCGGCCCCAGGGAGGCGTTTTTCCAA |
| | | | | | | 2883 | |
| | | | | | 806 | 62364 | CGCCCCTGGCATTCAGGGAATGGTTTGCAAATCTCAATGCACCACAGACT |
| | | | | | | 315 | |
| | | | | | 807 | 10299 | CGTGCAGTTTATTTATTATGAGAAGCCTGACTCAGGCCTTTCCTGTGTCC |
| | | | | | | 6197 | |
| | | | | | 808 | 44187 | CGCCTCCCTGAGACCTGGGAGCACGTGCACTGGCTTTGAAGACTCCCGAA |
| | | | | | | 132 | |
| | | | | | 809 | 17702 | AGGAAGGGCGCAGGAGGCTTGGGACCTGGGCCCCATTCCTGGGGCAGACG |
| | | | | | | 5198 | |
| | | | | | 810 | 18385 | GGGCCAGTCAGGGTTCTCACTGATGTCTTGGGTGTGGCTCTGAGACTGCG |
| | | | | | | 672 | |
| | | | | | 811 | 75315 | AGAGAGGGCGAACGGGACGGGGACTTCCTGGAAGATTCCTACCACACACG |
| | | | | | | 527 | |
| | | | | | 812 | 49057 | ACCCTGCTAAGCAGTTGTCTCCAGGTCATGCACCTTCAGAATGGAAAGCG |
| | | | | | | 661 | |
| | | | | | 813 | 42992 | GGGATTCGGAGCTTCCCCAGCTGGGGTGAGCCTGGCGTTCCCGGGCGGCG |
| | | | | | | 774 | |
| | | | | | 814 | 11513 | TTTCAGGGCCCAATTAATTCGCCGCGGGCGGTGGGGCGGAGGCTGTGCCG |
| | | | | | | 6072 | |
| | | | | | 815 | 97148 | CGGTTCAGCATTAAAGTTCAAGTGGAGCGGAGGGGGCTGCATATTTTTAT |
| | | | | | | 0 | |
| | | | | | 816 | 17513 | GAACTGAAGAACCGCGCAGGAAAAGGCTGCCTGGACCAGCGGGACATTCG |
| | | | | | | 3151 | |
| | | | | | 817 | 62798 | TGAGAGCGAGGGACACGGGTGAGTCACGCGGCAGAAACTCACGGCAAGC |
| | | | | | | 365 | G |
| | | | | | 818 | 59189 | GGCGAGAGCAGGGATTGTCAGCAACTCGGGCTGCAGAAGCAGCAGCAACG |
| | | | | | | 843 | |
| | | | | | 819 | 11181 | CGGAGCGACCAAGGACAGGCTCTCGCTGGCACTCAGGTTGGGTTCTCTCT |
| | | | | | | 3690 | |
| | | | | | 820 | 16554 | CACTTCGGAGCAGCCTGTTGGGGGTCGTAGGCTCTGCAGGCTCAGAAGCG |
| | | | | | | 619 | |
| | | | | | 821 | 32455 | CGCCCAAGGCTCGGGAGAAGGGCTCTGCCCTTGTTGCCCGCCTTCACCCG |
| | | | | | | 025 | |
| | | | | | 822 | 11021 | CACAGCAACCAGCACCATGCCCATGACACTGGGGTACTGGAACATCCGCG |
| | | | | | | 0770 | |
| | | | | | 823 | 39453 | AGGGGTTGCTGGGGTGAAGCTCGGTGGGGCAGCCCTGCCGCCTGGCTCCG |
| | | | | | | 625 | |
| | | | | | 824 | 13159 | AGATGAGGCCAGCGGGGAGGCGGGTGCGTGAACTCTTGGGAGATTCTTCG |
| | | | | | | 3730 | |
| | | | | | 825 | 31940 | CGCCTCAGTGTAAGATGGAAACAACACTGATGTACAAGGCCTGTCATGAT |
| | | | | | | 855 | |
| | | | | | 826 | 86060 | TGCAAAGCATTATCTGTGGCTGAGCCCATCACAATTCAACAAAGATTACG |
| | | | | | | 076 | |
| | | | | | 827 | 39015 | CGGGCAAGTTTGGCTCAGTCCTTGTCGATGCTCCAGGCTCGGCTTCCCTG |
| | | | | | | 928 | |
| | | | | | 828 | 27196 | CGCCGCAGCACGTGACCGCCCACATGACCGCCTCCGCCAATCTCAGCAGT |
| | | | | | | 286 | |
| | | | | | 829 | 84417 | CGGCCCCCACATAGGGCCAGACTCACCCCCTGGGGACCCCCCTGTCAATC |
| | | | | | | 933 | |
| | | | | | 830 | 11153 | CGCGGCCTTGCTGCTGCGCCTCCAAAGATCGCGCACCAGTCTGGCCCACA |
| | | | | | | 2679 | |
| | | | | | 831 | 89120 | TTTAGAGACTCTCCTGGTGTTCACAGCTCATCGTTGTAAATGAGGGGTCG |
| | | | | | | 7 | |
| | | | | | 832 | 43800 | CGCTCCTCTACAAGGAGCACTCGAAATTTTGCCGTGGGCCGCCTGCGGAG |
| | | | | | | 133 | |
| | | | | | 833 | 32741 | CGATCCTGAATGAATGAATGGATGGACAAAGCGACGAAAGAACGCAGTGA |
| | | | | | | 518 | |
| | | | | | 834 | 16937 | CGCTTCATCTCAAAACCGTCTGGTGCTGAGGAAGTGGCCCAAGATGGACG |
| | | | | | | 6470 | |
| | | | | | 835 | 15727 | CTAGAAATGCGCGTGCAATCTACACATCTCATATGACCGGGACACAATCG |
| | | | | | | 127 | |
| | | | | | 836 | 57090 | TGAATGGCAGGAGCTGCACCAGGGGGCTGTGCGCGCTGCGCGGGTGTGCG |
| | | | | | | 015 | |
| | | | | | 837 | 10289 | GCAGGTCTATTCCGCCGCTTGGGCAAACAGGCGGGTTAGTGCACTCCACG |
| | | | | | | 4441 | |
| | | | | | 838 | 37390 | GGATGGACGGAGTAGGGGTTCCCGCTTCCATGTACGGAGACCCTCACGCG |
| | | | | | | 326 | |
| | | | | | 839 | 17073 | CGGACCAGCACTCCACTGTGGGTCCAAGGATGAGCTCCAAAGAGCCCAGT |
| | | | | | | 594 | |
| | | | | | 840 | 79083 | CCTGCCCCGGGGAATGCGAGGCTGCTTCCCTTCTGCGTAATCAGGGTACG |
| | | | | | | 753 | |
| | | | | | 841 | 55589 | AAGCTTTCTTTGGGTGAGGCAGGGCCGTCCTGCCCAAAGCCCCTCCTCCG |
| | | | | | | 803 | |
| | | | | | 842 | 21915 | CGGAGCCTTAACCCTTCAAATACCCCCAGGAGAGCCCCAGCCGGGGCCTC |
| | | | | | | 1444 | |
| | | | | | 843 | 24803 | TGCTCGCAGTGGCCTGGGCCAGCGGCAGGGTGAGCCGAGCCTCTGCTGCG |
| | | | | | | 679 | |
| | | | | | 844 | 11421 | CGGAGGGCCCCCGTCTCCAGAGAGAGCCAAAGAGTCAGGCTGACTGCTTT |
| | | | | | | 3914 | |
| | | | | | 845 | 22931 | ATGTAGTGTTAACGGAAGAGTTTAGGTCCTGCCTCACTGTCCGGGAAACG |
| | | | | | | 71 | |
| | | | | | 846 | 15825 | GCTAGCTCTTCTTCTCCCAGGTGGTGACAATGCAGACGGTAAGAACATCG |
| | | | | | | 9926 | |
| | | | | | 847 | 18771 | CAAGACGACGGCGTGCAGGCTGGTTGCCTTGGTGACGGTGGTTGGGCTCG |
| | | | | | | 3964 | |
| | | | | | 848 | 39466 | TCCCTTTCCCACTTTGTTCTGGGAGGCAGTCGAGGGGCTCCCCGTGATCG |
| | | | | | | 313 | |
| | | | | | 849 | 86383 | TGCTTCCAGGGCTTGGTTTCGCTTTGCCTGGCTCTTGGCTAGGCCTGGCG |
| | | | | | | 182 | |
| | | | | | 850 | 13907 | GAGGCAGCTGGGGCGGGGGTGGCCGCGGGAGCGTCTTGCCCGTGTGATCG |
| | | | | | | 6670 | |
| | | | | | 851 | 89676 | TCATGGCCACGAAGGCATCGTGGTAGTGCCGCTTGGAGTTGTGGGCCACG |
| | | | | | | 3 | |
| | | | | | 852 | 11139 | CATTCCACCCCCCTTGTTTCCGCATTCATCCTGAGTGGCTGGTGGGAACG |
| | | | | | | 7401 | |
| | | | | | 853 | 91957 | TCGGCTGTGATGGGGAGCCCGGAGCAGCCAGGCGGCGAGCAGTAGCGGCG |
| | | | | | | 992 | |
| | | | | | 854 | 51430 | GCTGGTACTGCTGGGGGTACCGAGTCTCCTCTGCTTTGGCAAAATCCACG |
| | | | | | | 288 | |
| | | | | | 855 | 11553 | CGCAAAGCTGCTCTCTCACTCCGTGGAGTTGGATCTCTACCCCCGCAGCC |
| | | | | | | 0590 | |
| | | | | | 856 | 12190 | GAGGGGCACACGCCGGAGCAGCTCCAGCCTGGGAGCATTGGGCGTGAACG |
| | | | | | | 3520 | |
| | | | | | 857 | 11708 | GACGGGGATAGCGAGCTGAGTGTGCGAGCGCCAGGGGTTCCAGCTGCACG |
| | | | | | | 6850 | |
| | | | | | 858 | 11515 | ACAAAACAGGCACTCTCTGGCCTAGGAGTGGAATCCATCCTCAATTTTCG |
| | | | | | | 2785 | |
| | | | | | 859 | 29293 | CGGGATCCTGCTGGGGGCTACAGCCCAAACATGTTACTTTTCCAACTGTT |
| | | | | | | 450 | |
| | | | | | 860 | 64008 | CGGCAGAGGTACTCGGCCTTTGCCATCATTGCATCGCGAATTTCGCTCTC |
| | | | | | | 007 | |
| | | | | | 861 | 12869 | CTTGAAGCCTGCTCGGAGCTTGGGATTGTATTTTCTTTGGCTTTCTGGCG |
| | | | | | | 4303 | |
| | | | | | 862 | 21251 | CACAGACGGCTGCTGCTCCACCCTGGGGGCCCTGCAGGGATCAGGTGCCG |
| | | | | | | 82 | |
| | | | | | 863 | 11696 | CGCCCACAGCCCAATTCCCCAGGCGCAGCGAGCGCCTGCAGCCCGAAAGC |
| | | | | | | 3259 | |
| | | | | | 864 | 28998 | CGCAGACTTGGGTCCCTTCCGGACGCAGCCCGCGTGCTCCCCGAGCTATT |
| | | | | | | 214 | |
| | | | | | 865 | 10381 | AGTTCACACCGTACGGGTCGGCTCAGAGATGAAGCCAAAACCTTGGGTCG |
| | | | | | | 3150 | |
| | | | | | 866 | 16097 | GGATGGCGGCGGGTGGGGAGTGCGCCTGCACGTGTGTGCGCGCGGGTGCG |
| | | | | | | 4837 | |
| | | | | | 867 | 10191 | ACCGGAATTACAGCATTTCTTGGTAGAGGAAACTATCCCTCAGCCAACCG |
| | | | | | | 5091 | |
| | | | | | 868 | 14020 | CTGAGGCACCCTGGAAAAGTTCCCTACTTCCAAAGTCTGCAGGAGCTTCG |
| | | | | | | 1065 | |
| | | | | | 869 | 27015 | CGGGGAACCCCTCCTCCGGGGCCCTGGCAAGATGCTGGCTCTGTTGCCCT |
| | | | | | | 808 | |
| | | | | | 870 | 65290 | CGGCCGACTGGGGTCCTGTCCTCTTGTCACCTTGTATCCCTCGCATGCTC |
| | | | | | | 484 | |
| | | | | | 871 | 66664 | CGGGCATGTCTCTGGAGGAAGAAATTCAAAATCACAATAATAAAACGTGC |
| | | | | | | 535 | |
| | | | | | 872 | 13588 | TGCAGGCACCCCCGCGTGTATGGGTGTGAGTGTGCACGTGTGCCTGTGCG |
| | | | | | | 174 | |
| | | | | | 873 | 15852 | CCTTCTCCACATGCTTTTTGGTGGTGGGGGGATGTGGCTTCCCAAGGCCG |
| | | | | | | 4649 | |
| | | | | | 874 | 97319 | TTCTGACAGGCTTTTCCTTCATCGGTGGCCTTTGACTCCAGCTGACTTCG |
| | | | | | | 911 | |
| | | | | | 875 | 85307 | TTTCATAACCTGGCGAGAATCACTGAGCGCTATGAGGCCACCGCCTGACG |
| | | | | | | 131 | |
| | | | | | 876 | 11531 | CGGAGCCCCCGATCCCTCCGGGTCTAGCGCAGGCCCCACGGGGCCCCTTC |
| | | | | | | 469 | |
| | | | | | 877 | 37959 | GGATCGCTTCAGAACTTCAGCAAACATTCCACGAGGACTTCTCGGTGCCG |
| | | | | | | 465 | |
| | | | | | 878 | 75315 | CTGTCTTATACCAGCCCTGTGCGGCCAGGCAGGAAGGCTTCCGTGGTGCG |
| | | | | | | 108 | |
| | | | | | 879 | 49297 | ATCGCTAACATGGAGAGGCAACAGGCTAGAAGAGTCCCTGTCTTGGAGCG |
| | | | | | | 846 | |
| | | | | | 880 | 43741 | CGCATTTGTTGCTCATGGCGCTCGCCCCGTTCCAGGCCTCCCTGGTGCCC |
| | | | | | | 530 | |
| | | | | | 881 | 32213 | CGCTGGATCCTCTCCACATCCAGGCCGCGTCCACTGGCTTTCCAACCTGC |
| | | | | | | 28 | |
| | | | | | 882 | 22106 | CGGCTTCTTGAGAGCAGGGCTGGACTCTGCTGCATGGTTGGAGAAGCTCT |
| | | | | | | 4388 | |
| | | | | | 883 | 41749 | CGCGGAGACTCACTACCCCGACATCTACACTCGGGAGGAGCTGGCCCTGA |
| | | | | | | 443 | |
| | | | | | 884 | 63 | TCCTGCCCAAGACTGTGACTTCTGACCACCTGTACTTTAAAACCAGAACG |
| | | | | | | 0437 | |
| | | | | | 885 | 10289 | CGAGGCCGATAGCTGGGATGGGGCTGAAGAGCCCTGGCTCTGTTTTACCG |
| | | | | | | 4342 | |
| | | | | | 886 | 13494 | CGGCCCCAGGATGGCCCGCCCGTCTGCCCTCCGCCTTGCCCCGCCCACCC |
| | | | | | | 1229 | |
| | | | | | 887 | 27154 | TGAGCTGCGTGTCTGCACTCTGAAATGGGCACATGAGCCCTGGAGATCCG |
| | | | | | | 264 | |
| | | | | | 888 | 12925 | TCTTACGGGGTAACCTGTCAAGAACTGTCAAATACAATTTTAGGGAGTCG |
| | | | | | | 3169 | |
| | | | | | 889 | 78935 | CCCTGCAGAAGCGTCCCGACGGCCACATCGTGAGTGTGAGGTGAGGAGCG |
| | | | | | | 289 | |
| | | | | | 890 | 21414 | CGGAGGAACGTTAGGAGACTAGGGAAAGACCTCTGCCATTGGACTTTAAG |
| | | | | | | 9735 | |
| | | | | | 891 | 11513 | GGCTCTCCCCTTGGGCGGAGTGGGGCGCGGTGGGGAACACAGCTTGGACG |
| | | | | | | 6279 | |
| | | | | | 892 | 10090 | CGACGCCTCAGCCCGGGGAAGACTTGCACAGTACACATTTAGCGAGGATG |
| | | | | | | 5458 | |
| | | | | | 893 | 12043 | CAAGCGGCGCCACCGGATTCCATTTGTAAACTTATTAGTGTGCGCTCGCG |
| | | | | | | 5056 | |
| | | | | | 894 | 19788 | CGCACTGGCCCAAGGGGCAGAGAACATCAGAAGGAACCTGGCACATAACT |
| | | | | | | 1741 | |
| | | | | | 895 | 73847 | CGCCTAGAAGGCTGCTGGGACCCCAGACCCAGAGCCCCGGTCACACTCCC |
| | | | | | | 318 | |
| | | | | | 896 | 10280 | CCCGCTCACTGGGGAGCAGCCAGGGCAGGCCTACCTGGCAAGGGCCAGCG |
| | | | | | | 3787 | |
| | | | | | 897 | 22873 | TCGTAGCCTTGGAAACGGCTAAACAGCAGCGGGACGCGGGTGCGCATGCG |
| | | | | | | 6324 | |
| | | | | | 898 | 13536 | CGCCATCAGCCTTCCTGGGCCTGAGCGGTCAGCTGTTTCGGAAAGTCCAG |
| | | | | | | 991 | |
| | | | | | 899 | 54349 | CTGCCTGCGGCTGGAGGCGGCAGGGATTCCGGAGTTGGGGGATCCTGACG |
| | | | | | | 571 | |
| | | | | | 900 | 10325 | TAAGTCTTTAAGTTATTAATACAACGACAACTATATAACTCCAGTTACCG |
| | | | | | | 0866 | |
| | | | | | 901 | 13970 | CGTGCTTAATGCTTGGCTGTCTGGTAAGGAAAATAAAGTGGTGCATTTTG |
| | | | | | | 4416 | |
| | | | | | 902 | 13112 | TGGGGTAAGTTGGTATACGGTTCAGCTAGCACACTGGCATTTTCTCTACG |
| | | | | | | 2594 | |
| | | | | | 903 | 32915 | CGCCTAAATCTTGGCCACCAGCGCAAACATATGTCACCCGGCCCTGGAGC |
| | | | | | | 497 | |
| | | | | | 904 | 31799 | CAACATAGCGAAAACCCATCTCTACAAAAAACAATAGAATTAGCTGGCCG |
| | | | | | | 444 | |
| | | | | | 905 | 28502 | CTGGCCAGTTGGCTGAGGGTGGCCGCTCAGAGTTTGAAGTACACATATCG |
| | | | | | | 630 | |
| | | | | | 906 | 27153 | ACTTGGGTATGTTTCTTATGAATATTACACGCGGAGCAGCGTCTGGTCCG |
| | | | | | | 655 | |
| | | | | | 907 | 19789 | CGCTTCCGGCCCCGCCCTCAGCAGACAGCGGAGCTCTCACTCCACCCGGC |
| | | | | | | 8217 | |
| | | | | | 908 | 70710 | CGGCGGTCACATTCTAAGTCTAGGAGTCGGCGACGATCCAAAAGCCCAAG |
| | | | | | | 389 | |
| | | | | | 909 | 31739 | TGGGGTGGGGCCTGCTCTCTAGGGGACTCTCAAGCTCTTGGAAGGTCACG |
| | | | | | | 521 | |
| | | | | | 910 | 11021 | GTCATGGGCATGGTGCTGGTTGCTGTGGATTCTGCAGACAGGCCTCAGCG |
| | | | | | | 0699 | |
| | | | | | 911 | 75602 | CGGCCAGTCTTGCCAGCACGCGAGCCCCTCCGCACTCACCAGTCCCTCTT |
| | | | | | | 412 | |
| | | | | | 912 | 48938 | GCACCCTGGATTCAGGCCTGGGTGGCTTGAATTGAGCCTCAGAAGAGCCG |
| | | | | | | 576 | |
| | | | | | 913 | 11271 | CGCCCCTCACTCGCTCTGGCAGCCAGAGGCCTTGTTCGAGGGCCTGGAGC |
| | | | | | | 7207 | |
| | | | | | 914 | 18399 | GGGACGAGGCAGAGGGGTCGGCCGCGGAGGGGCAGGCGGTGCCCGGCTC |
| | | | | | | 4073 | G |
| | | | | | 915 | 20001 | AGAATTTCTTTTAAATCCCTATGAAGTTAAATTCCAAAATGTCACCTTCG |
| | | | | | | 2526 | |
| | | | | | 916 | 74734 | GAGGTGGGATCTTGGGTGCCTGGTGATCCCAGTGTGTGGGGCTGGGAACG |
| | | | | | | 762 | |
| | | | | | 917 | 54422 | CGGGGATCGCAACCTCCAGCCCGTGGGCAACGCGTTCAGCCCAAGACCCC |
| | | | | | | 925 | |
| | | | | | 918 | 37394 | CGGTACTAGGAAGAGGGTTAACAGAACAGGACACTAAAAACAAAGTACTA |
| | | | | | | 589 | |
| | | | | | 919 | 95025 | GGGGAAGCTCGTGGCGCTGGTCCTGCTGGGGGTCGGCCTGTCCTTAGTCG |
| | | | | | | 611 | |
| | | | | | 920 | 50276 | CTGCGTTCTGGAGCTTATCAACACAGTGGATAATTAAAATCATAAACACG |
| | | | | | | 772 | |
| | | | | | 921 | 11828 | CGCAGCCCCAGACCCACAGGCCGAAGCAATAACCAGCCAGATAAAGTTTC |
| | | | | | | 5064 | |
| | | | | | 922 | 70563 | CGGCTCGCCCTTTGGGATCCACAGCTAAGAACTGGCCAGGAACGATGCGA |
| | | | | | | 092 | |
| | | | | | 923 | 57309 | GTAACTCCCCAAATGACTTCAGTTAACTGGGCCTTGAATCACAAGGATCG |
| | | | | | | 394 | |
| | | | | | 924 | 54321 | AAATCGCCTTTGGCGTGTGCAGCTCGAGCGTTACAACGATGCAAAGTGCG |
| | | | | | | 346 | |
| | | | | | 925 | 95239 | CGCAGAAGTCTATGAAAATGTGTTTGTTGAGGAGTCACTCGCCCCAGTAA |
| | | | | | | 751 | |
| | | | | | 926 | 13210 | CGCACCCCACCTCCGTCTCCACAGTGTAGCCCTCAGCCTGAGATGCTGAG |
| | | | | | | 7534 | |
| | | | | | 927 | 48145 | GCGGCAGAGGTGCCCTGGTTGGGCGGCTGGGCGCCTGGGGTTCGACGCCG |
| | | | | | | 108 | |
| | | | | | 928 | 15666 | CGGCCGCCCCGTCGAACCTTTGGGTCTCCGAGCTCCCCGCCCCCGCCCCC |
| | | | | | | 87 | |
| | | | | | 929 | 21667 | CGCACAATATAAAAACGCTGCAACAATGGAAGGAAGAAAGGTTTGGGTTG |
| | | | | | | 333 | |
| | | | | | 930 | 24147 | CGAGATGAAAGGATCCTGGCTAATTTCTTTGACCACTGTCTTGCAAATGT |
| | | | | | | 4238 | |
| | | | | | 931 | 27887 | CGAAAGTGAAGGAATCAAGTCTGGCCTATCATCTTCAGACGGCTGTACAC |
| | | | | | | 547 | |
| | | | | | 932 | 14852 | CTTTTGCGAAAGGGGCGTCTTTCTTCGTCGTGGAAGGGACCCTCACTCCG |
| | | | | | | 659 | |
| | | | | | 933 | 20145 | GCACGTGTGTGGGCGTCACTGGCGCCCTCTATGTGGGCGGAAATCATCCG |
| | | | | | | 0575 | |
| | | | | | 934 | 75602 | CGCGCTGCCCCGCACTCTGAGGGCCTTCATTAGCTCGCTCCCCGCGCCGA |
| | | | | | | 167 | |
| | | | | | 935 | 26088 | CTTCCCTGAGTGCTTGCCGAGAAGGCTGAGCAAACCCACAGCAGGATCCG |
| | | | | | | 202 | |
| | | | | | 936 | 77595 | ATTTCTTTTGTTACCTGTGATCCGGGCGGGGGGCTCCTTTCGGCCGCTCG |
| | | | | | | 321 | |
| | | | | | 937 | 51189 | GCAGTTCAATACCAGCAGCAAAACGCAGGTTTTTGGGGGAACTCCCGCCG |
| | | | | | | 941 | |
| | | | | | 938 | 41339 | CGCCCCGATGGCTGAGCCGCGGCAACACCGCGTCCTTAAGCCCCATCCTC |
| | | | | | | 785 | |
| | | | | | 939 | 11944 | GCCCGGGGCGCTGTGGCTTGATTTGCAGGTGGTTAGGTGGTTGTCGTCCG |
| | | | | | | 3387 | |
| | | | | | 940 | 19104 | CGCCCCCCGCAACTACCAAGCAGCTGCCGGCGCCGCAGCGGGAACAGACC |
| | | | | | | 5309 | |
| | | | | | 941 | 13421 | CGCCTTTGCGCTCAGCTCCCCGCTGGCCGCGAGCTCTCCAGGCACTCCTG |
| | | | | | | 7040 | |
| | | | | | 942 | 13788 | CGGGGTCGCCACTGCGCCCAGCTGCAGAAAGCACTCCGCACCCCCAGCAA |
| | | | | | | 68 | |
| | | | | | 943 | 19754 | GGCGGCCGCGGCGGCTGGACTCACGGGGTGGTGGTGGTGGTGCGGATGCG |
| | | | | | | 251 | |
| | | | | | 944 | | |
| | | | | | 945 | 46388 | CGCCCCCCCAGGCTGAGCCACGTTGAGTAAATGCATGTGCACGGTCAGGT |
| | | | | | | 390 | |
| | | | | | 946 | 24872 | AATTAATTTATAAATCTGCGTCCAATTAGGCAAGATGCTTTTAAATCTCG |
| | | | | | | 319 | |
| | | | | | 947 | 85482 | CGCGACGCTGATTTATGGTCCAGTCGCTCGCTTGAACCCCAACGCTTTGG |
| | | | | | | 612 | |
| | | | | | 948 | 52327 | CGGGATGGCCCTCCGCCTACACCGAAAAGAGAACAGACCACAGCCTTACT |
| | | | | | | 649 | |
| | | | | | 949 | 87975 | ATACCACCTTGTACACACATGAACACAGAAGTGCCGGGTAACCGCGATCG |
| | | | | | | 798 | |
| | | | | | 950 | 14708 | TATTCGCTGAACGTAGGGAAGTGTCCCAAAGAAACGCGGCTCCCAGTGCG |
| | | | | | | 7225 | |
| | | | | | 951 | 49315 | TGCTGGGGGCTGCGTGGCTGGCGGGCCCGGCCCGCGGGCAGAATGAGACG |
| | | | | | | 302 | |
| | | | | | 952 | 85414 | CGCCGAGAGGTGCTGTGGAAGGGTTCACGCTCACCGCATGGGGGACCTCG |
| | | | | | | 016 | |
| | | | | | 953 | 86383 | CGCGGTCCACCCATTGGCGGGAGAGGACTCACAGACCGCAGCTCCTCACC |
| | | | | | | 466 | |
| | | | | | 954 | 11389 | ACCCTAAAATTTTCTTCTGATTTCTGGAGACCGAGGAGTTTACCACTTCG |
| | | | | | | 7550 | |
| | | | | | 955 | 10289 | CGGCCTTTGCGCAGCCGGTCCCTACCCTGGAAGGAGAAAATCAATCCGCG |
| | | | | | | 4639 | |
| | | | | | 956 | 15032 | ACTAAAGGTGGATACCTCCTTCACATGGTGTTTGCTATAAGGGTCAAACG |
| | | | | | | 3558 | |
| | | | | | 957 | 11515 | CGCGCACATCCCCGGCTTCCCCGGGCTCCGCGCCTTCCCAAGAGCCCCGT |
| | | | | | | 2492 | |
| | | | | | 958 | 16237 | ACGTGGGCATGTCTTGGCCCCTCTTGGGCTATTAACTTGATTGACTCACG |
| | | | | | | 3963 | |
| | | | | | 959 | 11731 | GACCATGTGGCAGGAAGGCTGCCTGGTTCTGCACATCTGGCCCCTTCCCG |
| | | | | | | 4052 | |
| | | | | | 960 | 22094 | CGCTTCCTTACGTGGCTAATAAAGGGGTGCTTACAGAGCATGGAAAAACA |
| | | | | | | 563 | |
| | | | | | 961 | 10286 | CGGGGAAATGGAAGACAAAGGAAATGGGGGGACATAGCAACCCCTATTCT |
| | | | | | | 7826 | |
| | | | | | 962 | 30095 | GAGGGGCTGCGGCTCCGGGGCTCGGGTCGTTTTGAGTTCCTATCTTTGCG |
| | | | | | | 549 | |
| | | | | | 963 | 49309 | CGCTCTTAATGAGAACACAATTACCCAGATGGAGAGGGAGCCTCACCCCT |
| | | | | | | 124 | |
| | | | | | 964 | 12268 | GAGGATCTCGGCGAAGCGGAAGGCTTTGGTGCCAGCTGGGAGAGTCTGCG |
| | | | | | | 6456 | |
| | | | | | 965 | 59189 | CGGGCGTGCCAGCCTGGAGCTGTCCAACTTTTCAGCAGCTCCGGGATCAG |
| | | | | | | 934 | |
| | | | | | 966 | 29759 | CTCACTCCCATTGAGTGTCGGGTTTCTAGAGAAGCCAATCAATGTAGCCG |
| | | | | | | 947 | |
| | | | | | 967 | 53313 | CGCCCCAGGACCTGCACCCTCTACCGGCCACGGGACGTCCCTCCGCACCC |
| | | | | | | 529 | |
| | | | | | 968 | 10031 | CTGAGGGACCCCGGCCAGGCGCGGAGATGGGGGTGCACGGTGAGTACTCG |
| | | | | | | 8626 | |
| | | | | | 969 | 75680 | CGCTCACGCAGCACTTCTGGCAGTCCCTGAAGGACCACTACCTCAAGTCT |
| | | | | | | 535 | |
| | | | | | 970 | 31516 | CGGTGCAGTGGTGGGGGCTGCCCAGCATCTACATCGAGGCCTGGGTGTCG |
| | | | | | | 045 | |
| | | | | | 971 | 84808 | CCGAGAGCGGTTGGGTCAGCGGCTTCATGGTGCAGCCGAGTCTCAAAGCG |
| | | | | | | 65 | |
| | | | | | 972 | 73642 | CGCCTGGGGTCTTGCGTCCACTGGCCTGGAAAGCGAGGGCTATGCCCCCC |
| | | | | | | 885 | |
| | | | | | 973 | 27228 | CGGCATTGTGGATGAGGATGTCCAACCGTGGCTCAGAGCTCAGAAAGGCA |
| | | | | | | 511 | |
| | | | | | 974 | 78173 | CAGGTTTGTCCCCAGTTGATAGTTCCGTGAGTTCCTCAATTATTCCTCCG |
| | | | | | | 250 | |
| | | | | | 975 | 87980 | GCTAGGGTAGAAGCCCATGAAGGGGGTCCCGCGGCGCTAGCTTTTGTACG |
| | | | | | | 976 | |
| | | | | | 976 | 19243 | TCTGGATGATGTCTGTCCACCCACCGTCTCTGAGTGTTCTCCTCACCTCG |
| | | | | | | 756 | |
| | | | | | 977 | 14852 | ATTAATTTAGGGCTTTTTAGTCTCATCTGGAGAGTAAGCTCCAAGCCTCG |
| | | | | | | 905 | |
| | | | | | 978 | 53183 | CGGCAGCAGCGGTTTCAGCGGTGGCAGCGGCTTTGGCTCCATCTCTGGCG |
| | | | | | | 930 | |
| | | | | | 979 | 66360 | CACCTTGAATGATAGAACTTGAACAGCTCATTCATACAGAGTAGAACACG |
| | | | | | | 46 | |
| | | | | | 980 | 10823 | CGGTGCCCCTGACCTGCAGTCGTCACCTGCACTCCAGGCGGGCAACAACA |
| | | | | | | 7937 | |
| | | | | | 981 | 12510 | CGTCCCCGTTGCCATGGCGAGAGGCGTCCTCTCCTATGGAGAGTGACAGT |
| | | | | | | 2346 | |
| | | | | | 982 | 21682 | CTTCTTCCCATAGTTTCTTTGCAGCTAGCAGCTCCTCATTTCTCTTTTCG |
| | | | | | | 505 | |
| | | | | | 983 | 11944 | GGGAGTAGCTCCTAAGTAGCCTAGACGCTGATTCAGGCCCGGACTGTGCG |
| | | | | | | 2971 | |
| | | | | | 984 | 92940 | ATCTCTCCGGCTCTTACTTGAAAAAGCACTTGGAAGAAACTGTGTGTGCG |
| | | | | | | 163 | |
| | | | | | 985 | 14034 | AACATCCCTACAATAATTCTGTCTCAGTTTGCTGTGGTAATTTGATCTCG |
| | | | | | | 4290 | |
| | | | | | 986 | 15114 | TGGAAGAACTTTGGACAACATTTCCGCGGAGACCGGCGCGACCACCTGCG |
| | | | | | | 3125 | |
| | | | | | 987 | 37571 | CCCCGGGGTTTGCGAAGGTCCGGGGTAGGAGGGCTGCAGCCTGCGCGACG |
| | | | | | | 732 | |
| | | | | | 988 | 10173 | CGACCCTGGGGGTTCCTGCCATAAAACAGTGAGGGATTCTGGCCAGGCTG |
| | | | | | | 38 | |
| | | | | | 989 | 14711 | GGGCGCTTTAAACAAATGGCTGCCTCCCAGCGCTCTGAGTTAAGGGACCG |
| | | | | | | 0367 | |
| | | | | | 990 | 11840 | CGCCCTGAACTTGCAGGCAAGACCAGTGGCAATGATGGACTCTTCCCGCC |
| | | | | | | 7645 | |
| | | | | | 991 | 38965 | CAGTTCTTAAGGTCCAGCAACACAAAGCGAAAAGTTAGTGGAGGACTACG |
| | | | | | | 014 | |
| | | | | | 992 | 66461 | CGGAGTTTGGAGTTTGAACCCACCCGCACCCCTTTGAGCTAGGAAGTTTG |
| | | | | | | 802 | |
| | | | | | 993 | 13920 | TGCTGCGGCGATCCGGGTCGGGCTACGAGGGCAGCACCAGCTGGAAGGCG |
| | | | | | | 8852 | |
| | | | | | 994 | 11918 | CGGGCATGTCCAGGAACCAGTCTGCTTCCAGTGCCACCTGTAGTTGCAAC |
| | | | | | | 0915 | |
| | | | | | 995 | 33169 | CGCTCTCTACTTCAGATCTTGCTCAGTTTTGCTTCCGGTGGGCTCCTGGG |
| | | | | | | 606 | |
| | | | | | 996 | 65730 | CGGTTCCATGCCATGTTTTGGAATTTGTGTTTACGTCTGCCTTCATCCCC |
| | | | | | | 351 | |
| | | | | | 997 | 71955 | CGGCGCTCGTGTGAAGAAGTTAATTCAATTCGCTCTGATAACCGAGTTAT |
| | | | | | | 547 | |
| | | | | | 998 | 19788 | TTTTAAGCGAGGCTCCGGATGGCTGGGATGTCTTTAGGTTAGTAGTCCCG |
| | | | | | | 8880 | |
| | | | | | 999 | 31505 | CGAACCTTTCAAAACAGAACAGGCGTTTGGTGCCAAACAGGGCAGGGTGT |
| | | | | | | 024 | |
| | | | | | 1000 | 12725 | ACCAGGCATTGAGGCTCTGGTCCTACACACTGGGCATAGAGATGAACACG |
| | | | | | | 6676 | |
| | | | | | 1001 | 19743 | GGGATGGAGGGACGATTGGGGAGCGCCCGAGGCTGCTGTGTTGGCGCCCG |
| | | | | | | 029 | |
| | | | | | 1002 | 15402 | CAGGCACAGTGTGGGAAGAGTGCCATTCAATCCTCCGCGTAACCCTGGCG |
| | | | | | | 7129 | |
| | | | | | 1003 | 52832 | CGGCTTGCAGAGTCCAGTTAACAAGAGATTGAGCTCAGGAGTCCGAGACC |
| | | | | | | 660 | |
| | | | | | 1004 | 95026 | CGCGTCTCGGGAGCAATTCAGTGTCGCCTCACGTCTGGCCTTGCAGAAGT |
| | | | | | | 097 | |
| | | | | | 1005 | 42798 | GATCCTGCTGAATAAAGGGGGTTCCGAGCTGGGCCGAGATGGGGCATGCG |
| | | | | | | 747 | |
| | | | | | 1006 | 56642 | CGAACTTGGGAAGTGACTGAAAAACTTGCACTGATGAATTGGAGGGGTAA |
| | | | | | | 61 | |
| | | | | | 1007 | 17383 | TTATCATCATTGTATCGGCTTTACAACACTTAAAAACCAGACTTGAGGCG |
| | | | | | | 4077 | |
| | | | | | 1008 | 20145 | CGCCCACACACGTGCTGGTGTCCCGGGAAGAGTTCCTGGCAAAGAGCTCA |
| | | | | | | 0610 | |
| | | | | | 1009 | 15356 | CGCGTCTGCGATGGGAGCTCGATAAGGTCACCGTCAACAGCATCCACACG |
| | | | | | | 73 | |
| | | | | | 1010 | 14042 | TGTGCAAGCCGAGGTATTGGCCGCCATAACGCACACTGACTTTTGTACCG |
| | | | | | | 0502 | |
| | | | | | 1011 | 49297 | CGAGGATATCGCTAACATGGAGAGGCAACAGGCTAGAAGAGTCCCTGTCT |
| | | | | | | 901 | |
| | | | | | 1012 | 14635 | CGGCGCAGAGCCCCGCCAACTCGCCCGCTCCTCCAACCTTAAGTCGTTTC |
| | | | | | | 0131 | |
| | | | | | 1013 | 44327 | TATTTAACCACTGAGTCTAATTCGAAAAATCGGGACTGGGCCCCTAGGCG |
| | | | | | | 267 | |
| | | | | | 1014 | 65778 | CGCCAAACTTTCAATAGTTTGGAGTGTAGATGTGAGACTTCAGCTGCCCT |
| | | | | | | 481 | |
| | | | | | 1015 | 27196 | CGCCAATCTCAGCAGTCCTCACAGGTGGTCTCGCTCCGCAGGGCCCGCAG |
| | | | | | | 320 | |
| | | | | | 1016 | 16228 | CGCCGTCTAGTGGCGGAATTGTCCAGGGAAGGCAAGTTAGTTTTATCCTC |
| | | | | | | 3434 | |
| | | | | | 1017 | 13958 | TGCAGGTTTGCTCCAATCACAGCAGCAAGGATTGAAGCACCAACCAGCCG |
| | | | | | | 3634 | |
| | | | | | 1018 | 87417 | CGCCTTACAGCCTCCAAATACAGAGGCAGCAGCCAGAACCCCAAAGGGCG |
| | | | | | | 818 | |
| | | | | | 1019 | 45285 | ACACAGATGCGTGTAAGAGGCATCATGCTCTAAAACAGTGCAGAAATGCG |
| | | | | | | 821 | |
| | | | | | 1020 | 15793 | CGGAGTTGTCACTGTGCCACTTCCTGGACGCGGTGAGGAGGCTTCAGCTC |
| | | | | | | 2951 | |
| | | | | | 1021 | 36919 | CGGGATGCTACGGAGGGAGGTGTATACAGGTGTTAGACAAAGCCCCCTCC |
| | | | | | | 344 | |
| | | | | | 1022 | 19788 | CGGACAGGTACTATCTGCTGGCTGTGGACAAACAGTGGCATCTGAGATGC |
| | | | | | | 9163 | |
| | | | | | 1023 | 25891 | CGCAAAACGAACCCGATATTTGCAAAACTTAGGAAAAGACACACCGGCGT |
| | | | | | | 005 | |
| | | | | | 1024 | 11913 | CGGTCAGTGCCTGGCTGGGGACCCGGACCGGTGATTTGTTCAACTCTAGG |
| | | | | | | 3965 | |
| | | | | | 1025 | 20460 | CGCACCTTTACACCACGCCGCGCTGCCCCAGCCTGCGTGCTGCAAACGAC |
| | | | | | | 45 | |
| | | | | | 1026 | 16012 | ACGTGCTGCTAGAGTGGAACAAGTATGTCAGTTCATCCAAACATAAAACG |
| | | | | | | 2503 | |
| | | | | | 1027 | 21022 | AGACTCCCTACAGGTGGGCTACACTTAGGGGTTCAAATGCTGCATTACCG |
| | | | | | | 565 | |
| | | | | | 1028 | 81233 | CGGCCGTTGAGCTCATTTTCAAAGAAAAAGGAAGGAGGACACTGGAAAAT |
| | | | | | | 028 | |
| | | | | | 1029 | 11667 | TTTGGGAGAGCAGCTGCGAGGGGACAGAATGCTTCGCTGTGGTGGTTCCG |
| | | | | | | 735 | |
| | | | | | 1030 | 28457 | CAAAGCCTGCGGGCGGGGCTCCTTGCAGGTCCCCGAAAGAATGAGAACCG |
| | | | | | | 624 | |
| | | | | | 1031 | 48495 | CGCACAGCACCTCTCCAGCTCCATGCACGCCAGGGGCCTGGGACCCTGGG |
| | | | | | | 22 | |
| | | | | | 1032 | 75874 | CGGGTTTCTCCATATATGGTGTGCAGCTCACTTTGTGTTCTTAACCCTGT |
| | | | | | | 499 | |
| | | | | | 1033 | 19004 | CGCTTGAAAAAAGTTTTCGCAGACTGTGCTGGAGCTGGTGCTGAAAAAGG |
| | | | | | | 4504 | |
| | | | | | 1034 | 54261 | CGTCTTAAAACTTTGCACTTTAAGCTGGGCATAGTGATGCATGCCTGTAG |
| | | | | | | 853 | |
| | | | | | 1035 | 54421 | GTATGTGCGTGGAGAGTGGGGCGGCAGGCAACCCGAGTTCTTGAGCTCCG |
| | | | | | | 578 | |
| | | | | | 1036 | 53344 | CGCTGACTCCTCTTACTGGTTCTTGGGTAGCAGCCCCCAACTTGGTCTGA |
| | | | | | | 30 | |
| | | | | | 1037 | 10848 | TTTCCTGTCACCAGTCCCCGATCAAGCATGGTGTCAAGAAGATGCCTACG |
| | | | | | | 5152 | |
| | | | | | 1038 | 74179 | GCATTTTAGCCAGCAAGACCCGCTTGCATTGCAGTCGTTCACGGTGCTCG |
| | | | | | | 101 | |
| | | | | | 1039 | 11952 | GGTGCTCCTGCTGAACAGCCAGAGCTGGGGAGTAGACCCCGCTTCACACG |
| | | | | | | 9266 | |
| | | | | | 1040 | 50896 | CGCCAGCCCTCTCTGGGCTCGCCTCCCGGCTACCCCGGAGTCAGACTGCC |
| | | | | | | 251 | |
| | | | | | 1041 | 80657 | CGGCCCGCTAAAAGCATGGACTGTTTTGGCAGTCACTGTCAGACCTCCCG |
| | | | | | | 784 | |
| | | | | | 1042 | 91316 | CGGCGGTTCTTAGCTTTTTAGTCTCTGTCACGCTAATACATGCTGTTAGT |
| | | | | | | 253 | |
| | | | | | 1043 | 23791 | CGACTGAAAAGCCATAACATTGTTTCATGACTAGGATGTAGGCTAAAGGC |
| | | | | | | 473 | |
| | | | | | 1044 | 78176 | CGGAGAAAAAACAAAGCAAAATTTGTTCCCCACACGGTTTTTGGCTTTAG |
| | | | | | | 085 | |
| | | | | | 1045 | 12439 | AAGAATCAACATGGCGAGAAACTCTGTGGGTGACGTCCGTTTACAAACCG |
| | | | | | | 7892 | |
| | | | | | 1046 | 10044 | CCGAGCATCGGGTGCGTCGTGCTCTTTTCTAGGAGCGTGGGGTGCCTTCG |
| | | | | | | 2118 | |
| | | | | | 1047 | 63615 | GCAAGATGGCGGGAACGGCTACGGTCAAAGTGTCGCGATAGGAGCTTTCG |
| | | | | | | 383 | |
| | | | | | 1048 | 27513 | CTTCGATGACATTCAACTGACTTACTCTTCCGAAGGAACGGCTAAAACCG |
| | | | | | | 009 | |
| | | | | | 1049 | 54369 | GAGGCCGAGTCCAGGAGTGGAAGCCGCGCGAGTGGCGAAGGGAGCAGTC |
| | | | | | | 447 | G |
| | | | | | 1050 | 14675 | CGGCGACCACTCCGCCTCTGCCGTCCCACCTGACCGCAGAGGAGACCCCC |
| | | | | | | 5301 | |
| | | | | | 1051 | 10547 | TCAACTCAGGGCGCAGAACACTTGGGGTCTGAGTGTGCAAGGACCATGCG |
| | | | | | | 9383 | |
| | | | | | 1052 | 21525 | CACACAAAGACATGCGAAGAGGGGCTGAACGAGGCTCGCGCACAAAGAC |
| | | | | | | 6254 | G |
| | | | | | 1053 | 37004 | CGGGACACTGATCTGGGACGCTGGGACTCAGCATACACACACCTGGCGGT |
| | | | | | | 582 | |
| | | | | | 1054 | 20212 | CGGGTTACAACTAAACTGGAGAACATGGCCAAGGATGGGAACTCAGCCTG |
| | | | | | | 2309 | |
| | | | | | 1055 | 11271 | CGAGTGAGGGGCGCAGAGGCGGCAGAGAGCGGAGAGCCCCGGTGTCTCCG |
| | | | | | | 7244 | |
| | | | | | 1056 | 78935 | AGCCTGGGTGGTGAAGGCCTCCCTGCAGAAGCGTCCCGACGGCCACATCG |
| | | | | | | 269 | |
| | | | | | 1057 | 89745 | GTAATAATTATTCCTGACAGTGACCAGTCACTGAACATTCCAGGCTTACG |
| | | | | | | 356 | |
| | | | | | 1058 | 22437 | CGGTCCCCGTTTCCTCAACAGAGGTTAAAAAGCTCGTGCTCTGGCCGGGC |
| | | | | | | 2558 | |
| | | | | | 1059 | 87081 | CGACCCCCCAGTGGGGTTTCTTTCCGAGGGTCCCGCCCCTCGCAGCTGCT |
| | | | | | | 978 | |
| | | | | | 1060 | 39786 | CGCTGAGCTTTTTTGGTCAACTCTGGGATGTGTGCACCATCTAATCGGTC |
| | | | | | | 04 | |
| | | | | | 1061 | 15071 | CGTCCAGGGCCAGCCAGCAGCCCCGGGCTGCGCCCCCGCGCCCACCCCCA |
| | | | | | | 0730 | |
| | | | | | 1062 | 10072 | GAGTCCCTTCCAGCACTCTCCCCTTTGTTCCTTTTTCTGGGCAAGAACCG |
| | | | | | | 2408 | |
| | | | | | 1063 | 31826 | TGTTTTCCTATTAGTTGCTTCGCGGTCGAGTTCTAGGCGCATAATCATCG |
| | | | | | | 574 | |
| | | | | | 1064 | 14358 | CGCTCCCACCGCGGCACTCCGCCTCTGGGCCTTTGAGGCGCCTGGGGCCT |
| | | | | | | 0965 | |
| | | | | | 1065 | 60150 | GGACGTCGGCGCCAGGGCTTGGGGTGGGAACAGGTGCGGGGCTGCGTCCG |
| | | | | | | 3 | |
| | | | | | 1066 | 14635 | GAGGGGCACCACTCCGGGAGAGGCGGCGCTGGGCGTCTTGGGGGTGCGCG |
| | | | | | | 0585 | |
| | | | | | 1067 | 27526 | CCAGCGGTACTTGCTCCGTTAGGGGCGGTCAATTAAGTGGCTTCTTGTCG |
| | | | | | | 256 | |
| | | | | | 1068 | 68908 | TTCCTCTGCCTGAGGTGCTGACCTTGCCTCTTTCCCTGACAGTAAGAACG |
| | | | | | | 60 | |
| | | | | | 1069 | 15046 | CTGCCCTCTCATAGCAGGGAGTAATTGCCTTCAGGTAAAAGTTGATTCCG |
| | | | | | | 1119 | |
| | | | | | 1070 | 14402 | CGCAGCCTGGGATATCACACTGGGCCATCTCAGAGAGGAGAGGCCTCTGT |
| | | | | | | 157 | |
| | | | | | 1071 | 14489 | CGGCTCACTGGCCGCGTCGCCACCGCGTCCCTGAGTGCTCAGAACTTACC |
| | | | | | | 9592 | |
| | | | | | 1072 | 11694 | CGCCCGGGCAGCCTGGGAGGGGCCCTTTGACCTTGACCCCGCTCCTTGAA |
| | | | | | | 6163 | |
| | | | | | 1073 | 31696 | TCCAAATGGACCAATCACCGAGGAGCTGAGATCGTGGCGGACACGTTCCG |
| | | | | | | 229 | |
| | | | | | 1074 | 19573 | CGCCTCCGCCCCGCACCTCCTGACCCCCGCCCACACACGGCGTGGAGCGG |
| | | | | | | 65 | |
| | | | | | 1075 | 13110 | TGCAGGAGTTCCTCTGAGCTCCGTGGGGAACAGTGCTGGCCCCGAGTGCG |
| | | | | | | 1440 | |
| | | | | | 1076 | 86383 | AGTCTCAGGCGGGCATTCTGAGCTGCTTCTTGTCACTGGGGAAAACCACG |
| | | | | | | 585 | |
| | | | | | 1077 | 22094 | TGAAACTTGGAATATGATTCCATGATTCTCCGGAGTCGGGTTTTCAAACG |
| | | | | | | 479 | |
| | | | | | 1078 | 52627 | CGCCCGCCGCTAGGTCCATCCCGGCCCAGCCACCATGTCCATCCACTTCA |
| | | | | | | 047 | |
| | | | | | 1079 | 19548 | CGCCAGTAGTGTTGTGGATTGGGGAGGAAAGTGAACAGTAGAGAAACAAA |
| | | | | | | 878 | |
| | | | | | 1080 | 11403 | TTTTCATGGACCCCAGATAAAGACTTTGACAGCCAGATATCCAAGATCCG |
| | | | | | | 1854 | |
| | | | | | 1081 | 32223 | TCTCCCAGAACAACAGTTGTGATATGATCTGTTTTGGGGCCCTTCCTGCG |
| | | | | | | 336 | |
| | | | | | 1082 | 20145 | CGCCCTCTATGTGGGCGGAAATCATCCGGCGAAGATGAAGACGACCCCTT |
| | | | | | | 0601 | |
| | | | | | 1083 | 72756 | CAAGAGGAAGCGGCCCCGTGTGGCTGGGGGCGGCGGCGCAGGTGGTAGCG |
| | | | | | | 155 | |
| | | | | | 1084 | 15468 | CGGACGCATGACCTTCTGGAAGATGCCACCGTGCGGGGTGCCAGTCCCTC |
| | | | | | | 0808 | |
| | | | | | 1085 | 19749 | CGGCCACTACTGCTGTGCCATCATGTGGGGGTAGCCCATGGCCTACACCC |
| | | | | | | 961 | |
| | | | | | 1086 | 24119 | CGAGGCCATAGGAAGTGAGAGCGCCATCATACTAATGTTAAATAGACTGA |
| | | | | | | 8066 | |
| | | | | | 1087 | 46800 | CTGCAGTCCCTAAGGGTGGAGAGTGCGGTGGGGATGTGCCTCCAACTGCG |
| | | | | | | 479 | |
| | | | | | 1088 | 45914 | GGGCAGGCAGAGGCCTAGGGGGTGGGCTCTGAGGGCAGCCACTCCCACCG |
| | | | | | | 949 | |
| | | | | | 1089 | 10882 | GAAGCTGGGGACAATGGTTATGGACCCGGGCGGGGCCTTGTCCTTGGCCG |
| | | | | | | 238 | |
| | | | | | 1090 | 37571 | CGGGGCTGGGCGGCCCTGGGTGACAGACACAAGCTTCTGAACCCAAGCTA |
| | | | | | | 687 | |
| | | | | | 1091 | 66612 | CACATTTAGGCTGGAATGGGTGACAGCATGCGAGCTCGGGGGTGGGCTCG |
| | | | | | | 955 | |
| | | | | | 1092 | 35706 | CCTGCAACTTCAAGTCCCCAGGTGGCTCTGCCAGAGCGTTCACGATGACG |
| | | | | | | 038 | |
| | | | | | 1093 | 87800 | CGGCTGCCTTGCTGCAGCGAATCCGCACAATTAAAAGCTTTAATTAGTGG |
| | | | | | | 511 | |
| | | | | | 1094 | 87974 | CAGGTTACCGGCCAGAGTGGTGGCTCTTGGTGCAGGGCATGCTGCTCTCG |
| | | | | | | 464 | |
| | | | | | 1095 | 75315 | CGGGTTTGAATGAACCCTTGAGGTGAAGCTTAAAGACAGAGAGGATGCCC |
| | | | | | | 244 | |
| | | | | | 1096 | 49311 | CGCTCCGGCTCCCGACCTCCCCGCTGCCGAAGCAACTGGGTCAGCCTTTC |
| | | | | | | 782 | |
| | | | | | 1097 | 54391 | CGGGCTGCACAATGCCACGGCTGCTCCGCCAGCTCGCCCCTGCCCCGTCC |
| | | | | | | 325 | |
| | | | | | 1098 | 14572 | CGGCCCCCAGGCCTCTCACCGTGCACGTCTCTGTTCCGCTGCCACAACAG |
| | | | | | | 8526 | |
| | | | | | 1099 | 10909 | CGGTGGAGGCTTCTGTTCTCAATGAAATTCACTTGCGGCTTTTTAACTGC |
| | | | | | | 4032 | |
| | | | | | 1100 | 29139 | GGACGTCGGAAACATGCCCATGGGGTGGGCAGAGCTGCTCTGAGGTGCCG |
| | | | | | | 522 | |
| | | | | | 1101 | 28415 | GCATGCCCACGGCGACAGCGGCCACGTTAAGTGAGGGTCGTCTTGTTCCG |
| | | | | | | 023 | |
| | | | | | 1102 | 23171 | CGGCCCGCGACGGAGTTCCCAGGAAGAAGGCTGGCTGCAAAAACATTCCC |
| | | | | | | 2971 | |
| | | | | | 1103 | 17305 | CGGGCGCCTTGTAAGCGTCACATTTAGTTTTGCTGTGAAGCGAGTCAGGT |
| | | | | | | 79 | |
| | | | | | 1104 | 70482 | CGCCATGGGCTACTCAGTTTACAGCCACTGCAGTATCACAGCCAGGTCAG |
| | | | | | | 290 | |
| | | | | | 1105 | 25562 | GTAAGACCTAAAGTTCTTAGGAGATTGTCCAAAACAAAGAAACATGTCCG |
| | | | | | | 840 | |
| | | | | | 1106 | 57274 | CGCCCGAGGTCCCGCTCCACTGCCCGCGCCCCCCGCGCAGCCTTATATCT |
| | | | | | | 739 | |
| | | | | | 1107 | 38821 | TGGCTAACTGAACCTTATCGATAGGATGAGTCGCTGCGGCAGTCTGCTCG |
| | | | | | | 420 | |
| | | | | | 1108 | 42688 | CGCCCCGAGGCGGGGGCGCACTCACCACCAGCCAATGGGCGCATCTTCCA |
| | | | | | | 849 | |
| | | | | | 1109 | 23997 | TGCGGGACCCGCCAGAGTGTGCTTGGCTTCCGCGTGTCCGTGTGTCTGCG |
| | | | | | | 4554 | |
| | | | | | 1110 | 45914 | CGCCCGGCCTCCCTGCCTCTGCGCCTTCACCTGACCGCAAAGGCGGCCAG |
| | | | | | | 688 | |
| | | | | | 1111 | 35258 | GAGGTGGGGACGATGGCCGGAGTGACGCCCGCGGGAGCCCTGCTGGACCG |
| | | | | | | 594 | |
| | | | | | 1112 | 40657 | TCCAGAAAGGGTTAAACCCGGGCAAGCACCAGCTCCACGCAGTTAATCCG |
| | | | | | | 083 | |
| | | | | | 1113 | 13414 | CCCTCCCCAGGGATGTAGCTCTCAAGCAAACCTAGGCTGGGACGGATGCG |
| | | | | | | 7327 | |
| | | | | | 1114 | 12733 | CGGGGATCTATTGTGTCCCATTGAGGACTTAAATGAGCTGAATAATTGGC |
| | | | | | | 2027 | |
| | | | | | 1115 | 16757 | CCTACACCGCCGAGGACCGACTATTGTGAAGCCACTTTGGGAGCGGGTCG |
| | | | | | | 985 | |
| | | | | | 1116 | 86383 | GGGGTGAGGAGCTGCGGTCTGTGAGTCCTCTCCCGCCAATGGGTGGACCG |
| | | | | | | 464 | |
| | | | | | 1117 | 11633 | TACCAGCTGAGCCTGATTACACAGTCTGTGTGCCTGTCCCAGGACAGACG |
| | | | | | | 6029 | |
| | | | | | 1118 | 12331 | CGCCCCGCTGCGCCCACCTCCCCGGCTGCTCCCGGAGGGCTCACAAAGGC |
| | | | | | | 7487 | |
| | | | | | 1119 | 60075 | GCAGGTTGAAACAATCGAGTGGGCGCGCCAGGACTCCCCAGCTCCTGGCG |
| | | | | | | 23 | |
| | | | | | 1120 | 89744 | CGGACATCGAGTCTGACCTTGACCGAGACCCCAATAGTGCAACAGACTCG |
| | | | | | | 621 | |
| | | | | | 1121 | 32421 | GCTTGTCTGAGCGAGACCTAGACCGTGACGGTGCACGCCTACGAGAATCG |
| | | | | | | 808 | |
| | | | | | 1122 | 63795 | CGGTTTAATTAAGCCACAGCCCTAGCACGAGGACCCCGGCGACCCATCCG |
| | | | | | | 934 | |
| | | | | | 1123 | 11067 | CGGGAGGGGGCTTCTGGTCCCAGGCCCAAGACCGACCGCTTTGCAACTGA |
| | | | | | | 9107 | |
| | | | | | 1124 | 18141 | CGCCCCCTCGGACCTGGCGCCGCTGCGCCTGCTGGAGCCTCGCTTCCCCA |
| | | | | | | 3847 | |
| | | | | | 1125 | 51147 | CGCTGCAGATTAATTTTGTCATAAAATTGACTGGTGTGCTAAGGGACGTT |
| | | | | | | 461 | |
| | | | | | 1126 | 31516 | CGGCTGGTCCGGGCCCAGGCCCTCCTCCAGCGACACCCAGGCCTCGATGT |
| | | | | | | 015 | |
| | | | | | 1127 | 12331 | GCCTCTCTTTAAATATCAAGCTCACAAATATGTTTAATGAACTTGATACG |
| | | | | | | 3831 | |
| | | | | | 1128 | 27118 | CGCATTCTTTTGGTTTGAGGAATGTAGTATTGTCAGGTTGTTGCCTGCAC |
| | | | | | | 5 | |
| | | | | | 1129 | 10547 | CGCCGTCCTCCACCAGCACGTCGGCCACCTCCGAGAAGTCATCGTTGACC |
| | | | | | | 9058 | |
| | | | | | 1130 | 26897 | CGGCCAACACAGGAGGCACTGACCACGGGGCAGGCGCTATTTAAAAATCG |
| | | | | | | 6 | |
| | | | | | 1131 | 21251 | TGGCCTACTCACCTGGGGGCGAACTCCTTCTGGCACATGGGGCAGCTGCG |
| | | | | | | 14 | |
| | | | | | 1132 | 64343 | CGCAACACTCCCGCAGAAACACACAGCCCGGCAGCTTCTGAGGCAGCGCG |
| | | | | | | 315 | |
| | | | | | 1133 | 11860 | ATTTGAAATACAGACAGGATCCCAACCTGCACTTGCATGACCTTGTCTCG |
| | | | | | | 1891 | |
| | | | | | 1134 | 42075 | AAGGGAGCCCAACAGTCTTCATAAGCCAGACCTAGTCTCTAAGGTCACCG |
| | | | | | | 406 | |
| | | | | | 1135 | 20953 | GGGAGAGCATTTGCCCTTCTGTTTTTCTCCCTTTGTTACTGATTGGTTCG |
| | | | | | | 6324 | |
| | | | | | 1136 | 66122 | CGCCCAGACACCTCTCGAGGAAGGGAGATTGGACTTTCCCAGATTGGAGG |
| | | | | | | 804 | |
| | | | | | 1137 | 22624 | GCCACCAAATGGCGGCTCCGGCAGCCTGCTGCACTGATAAAGAGGACTCG |
| | | | | | | 374 | |
| | | | | | 1138 | 50892 | CGGCCTCACCCCAACGCAGTCCCTTTGGACGCCACCAGTTCCTGGGCGTG |
| | | | | | | 511 | |
| | | | | | 1139 | 10129 | CGGAATTTTTGTGCCCGAGCGCTCGGGATCCACGGCAAAACCAGGCACAT |
| | | | | | | 0699 | |
| | | | | | 1140 | 66041 | CGAAGACAGGTCTTGAATATAGACCCTGACTTTTTCACTGTTTGGTTTCT |
| | | | | | | 90 | |
| | | | | | 1141 | 87862 | ACAGATGTGCTTGCATCCGGGCCGTGCGTGCCTGCTTCACGGGTTTTCCG |
| | | | | | | 264 | |
| | | | | | 1142 | 32977 | CGCCCTCGCACTCACCCTTGGTGGCCCCTGCCTCCTGCGGGCTCAGGAGG |
| | | | | | | 217 | |
| | | | | | 1143 | 15718 | TGGCTCTCGGGTGTCAAAGGCTCTCCCAAATCTACATGGGGTGTTCCTCG |
| | | | | | | 5402 | |
| | | | | | 1144 | 85418 | GTGTCTCGTCCGAGGCCCTGGCTGTTCCTGAAACGGCCTGGCCAGGACCG |
| | | | | | | 371 | |
| | | | | | 1145 | 14079 | CGGCTGCGCAGACCTTGCCCAGCACACCAGATTGCCAGCTCCGAGACCCG |
| | | | | | | 7280 | |
| | | | | | 1146 | 58099 | CTCCTTCCCACTGTGTACCATGTACAGCATTGCTATTACAGGGAACTTCG |
| | | | | | | 11 | |
| | | | | | 1147 | 84815 | TAATTACCTCCTCTGCAAAGAGCTTTCCCTAGTATATTTTATTGATTGCG |
| | | | | | | 37 | |
| | | | | | 1148 | 12175 | CGCCCCGCCTCATTCTCGGGAAGTTTCAGGAACTTCCAGGGGAGTTGCAA |
| | | | | | | 8653 | |
| | | | | | 1149 | 16216 | GCTGGTGGGTTCTCAGTCAAGCAGGGCTGACAGCCGTCCCTCTTTGGACG |
| | | | | | | 215 | |
| | | | | | 1150 | 14966 | GGCGTTTTGGAGGTGGTTGCCATGGGGACCTGGATGCTGACGAAGGCTCG |
| | | | | | | 9368 | |
| | | | | | 1151 | 12617 | CGAAACCCTGGGAGACGAATCATACTGCAAATCATATCCCTGGGTAGCAG |
| | | | | | | 3246 | |
| | | | | | 1152 | 11004 | CGATTCAATTAGGCCGCCCCGCTCGGAAGCTTGTCTCCTCTGATATCCAG |
| | | | | | | 4639 | |
| | | | | | 1153 | 50884 | CGGCTTCCGCCCACCCATGGACTACGCCTTTAGCGATCTCATGCGTGACC |
| | | | | | | 480 | |
| | | | | | 1154 | 20000 | CGCGCCACGCCAGATCGAGATACTCTCATAGTGATTGTGAATCAATCGCC |
| | | | | | | 3800 | |
| | | | | | 1155 | 14023 | ATCTTATCCTTCTCTTGTTTTACAAATCGACGAATCAGCGGTCTAGAACG |
| | | | | | | 5586 | |
| | | | | | 1156 | 15400 | CGCCCGCAGCCACAGCCTCGGTCACCGCATCCATCAGGGCCCCGCGCCGC |
| | | | | | | 2064 | |
| | | | | | 1157 | 36919 | CGGCTTCACCTCTGGCACTCTCTGAAACGTCGTTGTCTATGGTTTCCCTA |
| | | | | | | 409 | |
| | | | | | 1158 | 15669 | CGGTAAAAGGCCCTGGTAGAACACTACATGACCCCTCTGATAAATCATGC |
| | | | | | | 5410 | |
| | | | | | 1159 | 32583 | CGTAGACGAACAAGGAAAAGTTTACTATGTGAGTAATAAGGCATTTGTAA |
| | | | | | | 696 | |
| | | | | | 1160 | 10675 | GGGGCTGGGTTTCTAAGGCAGGTTTCTAAGGTGTCTTCCTACAGACACCG |
| | | | | | | 0120 | |
| | | | | | 1161 | 37123 | CCTTCCCGCTAGGGCTTCTGGGAAGATCTACAATATTCATGAGGGAGGCG |
| | | | | | | 767 | |
| | | | | | 1162 | 14154 | ATGCTTGCTCAGGTTTATGCCCACATAAAACTTCTGAGCTGTTGTTTTCG |
| | | | | | | 788 | |
| | | | | | 1163 | 11138 | GAGGGCAGCCGGCAGGGGCTGGTACCAACTTGGCGGTTCTCGGAGGGGCG |
| | | | | | | 5450 | |
| | | | | | 1164 | 65498 | CGGGTAACTAGAGAGCTCTATCGAAGATGATCATTTGCTGGTCCTGCAGT |
| | | | | | | 537 | |
| | | | | | 1165 | 47696 | TTCCCGCTGCACTCCGGCTTCATCCATTTCTGGTCAGTTTCGTGGGTGCG |
| | | | | | | 701 | |
| | | | | | 1166 | 33592 | CGCCCTCCGCTCCCGCCATGGGGCCAACGTGGGGCTCCTAAGAGTTGCCG |
| | | | | | | 642 | |
| | | | | | 1167 | 49617 | CGGCAGGATAGTTTATGCCTGGGCTCCTGCGTTGGCATATGCGCCTTGAG |
| | | | | | | 042 | |
| | | | | | 1168 | 25486 | CCTTTCCTGGTGCCCCAGTCTTCTGCACTAAGCTGTGGTGAGCACATCCG |
| | | | | | | 849 | |
| | | | | | 1169 | 20871 | CGAGCCCACCAACCATGCCATCATTCAGACGCTGCTCAACTCCATGGCAC |
| | | | | | | 002 | |
| | | | | | 1170 | 50444 | GAGGTGCTGGGGAGCAGAAGCTGGGATCTTTCCGATTTCAGACTCCAGCG |
| | | | | | | 522 | |
| | | | | | 1171 | 11153 | GCCTGTCTCCCTTTACCCTGACGGTATTTTCAGAGGCACTAGGAGAAGCG |
| | | | | | | 2996 | |
| | | | | | 1172 | 11953 | TTGCAAAAGGATAGAACCGTCTCGACCAGGGCACTAGGACTGGAAGATCG |
| | | | | | | 2116 | |
| | | | | | 1173 | 11913 | CACGGCAGGAAGGTGGCGGTAAAGTCAGGGGCGAGCTCCTGGTCAGGGCG |
| | | | | | | 4323 | |
| | | | | | 1174 | 15731 | AATAGGGGGTGAGGACATTCAGATGCCCAGGGACCACTCGGCCCGTCACG |
| | | | | | | 4735 | |
| | | | | | 1175 | 10090 | TACTCTTAAAGTGCTAAAACAGTGTCCACTGCAGAGTAAACTTCCTTCCG |
| | | | | | | 6685 | |
| | | | | | 1176 | 18424 | CGCGCCCAGCTCCCTGTGAATACCCACTGATTGCCCCCGGAGTCTCCCCG |
| | | | | | | 3718 | |
| | | | | | 1177 | 81185 | TGAGATGTCCCCAGCAGGGGGCTTTGGGCGATTAACTTTTCGGAAAGTCG |
| | | | | | | 022 | |
| | | | | | 1178 | 41974 | GATGGAGTCACCCCCACCCTGGGAAATCGGGCACCTGACATGGACAGTCG |
| | | | | | | 087 | |
| | | | | | 1179 | 50889 | CGCAGAGAGGCGCACCGGACACGGTAATTAGGAGCAATTCACACGCTCTC |
| | | | | | | 442 | |
| | | | | | 1180 | 69452 | CGGCTGGTACCCTGAGCAATATGAACCCCCAAATCCACCAGAGATTCCCT |
| | | | | | | 398 | |
| | | | | | 1181 | 85403 | GGCCGGACTTGACCATTTTTAAAATGTTATGAATGACACATTTAGAGACG |
| | | | | | | 409 | |
| | | | | | 1182 | 11912 | TTGCTCTGGAGCTTCCCAGTTCCCAGGACTCTGGGGCTCTTCCCTGGACG |
| | | | | | | 5722 | |
| | | | | | 1183 | 27725 | GACGCAGCGCCTTTGTGTGGCGGCGGGTGTCGGGGGCGGGAAGAATCGCG |
| | | | | | | 188 | |
| | | | | | 1184 | 70150 | CGGCCCCGTTGATGCAACTGCATGCCATGGTTGCCAGAGAATCCTAGGTA |
| | | | | | | 722 | |
| | | | | | 1185 | 27647 | CGCCCTCCGAGTGTATGTCTATCCCAGAAGAAAACCTGTCTTAAAGTTCG |
| | | | | | | 713 | |
| | | | | | 1186 | 49468 | CGCGGCCGACCCCCTGTCCCCACCCGAGCAGGATTTCCTGATGTAAACAC |
| | | | | | | 988 | |
| | | | | | 1187 | 17700 | CGCATGTGCAGTGAAATGGCCTAGCCCGGGAATTCGATCGGCAAAGCACG |
| | | | | | | 4604 | |
| | | | | | 1188 | 13534 | CGGCGATGGCCAAATAATAAACTAACAGTAATATTATAGTAACAGCATCC |
| | | | | | | 2218 | |
| | | | | | 1189 | 10031 | GGACGCCTGGGTTGAGGCTCGCCGGGGCGTGAGCGGGGCTGCTGCAGACG |
| | | | | | | 8194 | |
| | | | | | 1190 | 76375 | AGCACACACCTTCGTCCGCATTTCAGGGACAAAAGTCGTCCAAGGAATCG |
| | | | | | | 33 | |
| | | | | | 1191 | 29387 | CGTGGCGGGCAGGGACATCACGGAGCTCCTCATGCAGCTGCTCCTGGCCA |
| | | | | | | 99 | |
| | | | | | 1192 | 85478 | GCCCATTTGTGCGGCGCTGCCTGGTGACTCAGCGTAGGCTGATGTTCACG |
| | | | | | | 296 | |
| | | | | | 1193 | 33700 | CCTAGAAGCTCCCACCCTTCTGACTGTTGCCACGTAGTTCTTAGTTTCCG |
| | | | | | | 817 | |
| | | | | | 1194 | 12024 | GTGCTGATCCCAGTGACAGAGCAGCATGAGTCACTGCCCGCCAGGGCTCG |
| | | | | | | 2330 | |
| | | | | | 1195 | 84140 | CGGCGCCAGCCATGGAGCCCGAAGCCCCCCGTCGCCGCCACACCCATCAG |
| | | | | | | 683 | |
| | | | | | 1196 | 11023 | CGGGCAGCCCTGAAGAGGAACGGTCCCTAGAGTCCGTCCCGCAGCTGCTT |
| | | | | | | 0633 | |
| | | | | | 1197 | 15350 | TGTGCATGCACGTGGGAGCCCAGCCCTGTAAGCACCATTCGTTATTTACG |
| | | | | | | 9096 | |
| | | | | | 1198 | 51891 | CGCTGTTTCAGACAACAACAAAGCCACAGGGAGGAGTTTAGCTGCAGTGA |
| | | | | | | 409 | |
| | | | | | 1199 | 10149 | TATTTGTGACGTAGGACACATGGTCTACTTCTTCTCAATATCACATCTCG |
| | | | | | | 1994 | |
| | | | | | 1200 | 29186 | CGAGGACCCTGCAGAACTCGAGCCTTTAAGCGCTCCTCTAGGCTCACATG |
| | | | | | | 153 | |
| | | | | | 1201 | 58055 | AACAGGGAGGCGAAGACAACTTTGTTTTTTCCCGGGAGAGCCCTCGCTCG |
| | | | | | | 876 | |
| | | | | | 1202 | 13616 | ATGAATTAGGCTGGAAACTGCCCCCATACCTCTAAGCTATGGGAAGACCG |
| | | | | | | 537 | |
| | | | | | 1203 | 11638 | AGTGGGTTAAAACCACAACCCTTGGGGAGCCCCAGAAGTGGCTCATCTCG |
| | | | | | | 0316 | |
| | | | | | 1204 | 62304 | ATATGCAGGTCTCACTTTAAAAGGTCTTGAAATGGAGTTCCTACCAGACG |
| | | | | | | 470 | |
| | | | | | 1205 | 12371 | CGAGAAAAGGAAATTTTAAAAGGCACAGGAAATGGTCCTACAGTAATCTG |
| | | | | | | 3553 | |
| | | | | | 1206 | 10374 | CGAGGCCCCAAGATCCATGTCGCCCGGAATCCCGGTGCCTAGGCCTTGTC |
| | | | | | | 0065 | |
| | | | | | 1207 | 17013 | CACAATCCTGGGTCGTCGGGGGACTGTACCGAGCGCCCTTGGAGTGCTCG |
| | | | | | | 6278 | |
| | | | | | 1208 | 56355 | TGTCAAAGGGCAGCAGGGCCCGGCCGTTGTCTTGGAAGCGCTGGTTGACG |
| | | | | | | 299 | |
| | | | | | 1209 | 15156 | CGGATATGGTTGGTGATTAAAAATCATTATTTTCTTTAGTCTGGGAGAAG |
| | | | | | | 1584 | |
| | | | | | 1210 | 12490 | GAACAACTAGGCGGGATGTACTTTTGAGCCCTGCCGGGTGTCTCCGATCG |
| | | | | | | 2844 | |
| | | | | | 1211 | 10506 | CGCGCACCCAATTCAGTCGCCCGCTCCCGTTCGGCTCCTCGAAGCCATGG |
| | | | | | | 6793 | |
| | | | | | 1212 | 12431 | AAGGGTAGAGTGGACTTCCCAGAGCTTTAGTACCTGAGACTGGGGACTCG |
| | | | | | | 1399 | |
| | | | | | 1213 | 80255 | CGGAGGGCTCCCGATGAACCGAGTCACGTTTTGTAACCACATTAACGGAC |
| | | | | | | 93 | |
| | | | | | 1214 | 47934 | CGCCCCCAACTCAAGGCAGGCTACACAAGATCTGTCTCCGTTGGCGTCCC |
| | | | | | | 802 | |
| | | | | | 1215 | 70984 | AGGAACATCTACCCGGCTAAGAGACGCCGCCAGAGTCCCTAAAGCTGGCG |
| | | | | | | 559 | |
| | | | | | 1216 | 80531 | GTCGTTTCCAATGACGGACATTAACCAGACTGTCAGATCCTGGGGAGTCG |
| | | | | | | 599 | |
| | | | | | 1217 | 17848 | CGGGGTAGCATAAGAACCTGCTCTAATTCCAAGGGAATTCAAGGAGTTAA |
| | | | | | | 4058 | |
| | | | | | 1218 | 19185 | CCAAGCTGATAACAGGATTAGTCGCACCGATAAGGAATGCTCTGACAACG |
| | | | | | | 165 | |
| | | | | | 1219 | 59189 | AGAGGTTGGTCCTTCTTCCTCCCTTTCTTCTTCCCTTCCTTTGGGCGCCG |
| | | | | | | 791 | |
| | | | | | 1220 | 22482 | ACAAGGGACATCTTTTTCACAGACTTGCCTTACACAGTTTCTTGAAGACG |
| | | | | | | 4500 | |
| | | | | | 1221 | 69762 | CGGAAATGAGGACAGGTGAAAGGAAGAGACCCAATCTTAATTAGAACGGT |
| | | | | | | 23 | |
| | | | | | 1222 | 24248 | TTGGCGTCGCGAGCGAGCGGTGGACTTGCCGGCTGGGTGCAAGCAGGGCG |
| | | | | | | 0504 | |
| | | | | | 1223 | 18067 | GGAAGGGCCGCCTCACTCACCTCGGGCGCCAGTAGGTGCAGGCTGGGTCG |
| | | | | | | 816 | |
| | | | | | 1224 | 33701 | CGGCTGAGGCAGGCTCCGCAGACCCCGAGCCAGAGTGGGATTTAACGGCG |
| | | | | | | 353 | |
| | | | | | 1225 | 58207 | CGACAAGGAGATCTGCATGATCAAGGTAGAGATCCAGGACATCAACGACA |
| | | | | | | 013 | |
| | | | | | 1226 | 62069 | CGGATATCGCGAAAGACACAGCTTAGCCCAGAGCCTATGCTAAGAACCCT |
| | | | | | | 806 | |
| | | | | | 1227 | 96294 | CGGGTAGTAGACATGCTTCTGGAAGGGCTGCGGGGGGCACAAAGAGAGCG |
| | | | | | | 131 | |
| | | | | | 1228 | 40719 | CGGAAACTTGAAGGCCTAAAAAATTAGCTGACCTTGTTAAAAATGTTGGC |
| | | | | | | 088 | |
| | | | | | 1229 | 16850 | GACCCCTGGGACAGGCAACTCTGGGGCCGTGTGACCTCCAGGACGGTTCG |
| | | | | | | 2341 | |
| | | | | | 1230 | 11004 | TGATTCCTGCTCCCTAAGCCTGGCTCCCTGTGGTGGGGGCTGGAATGCCG |
| | | | | | | 4531 | |
| | | | | | 1231 | 72754 | CGGTTAGAACGCGCTCTACATCCGCTTTAAAGACAGAGGTCTAGACGTGA |
| | | | | | | 469 | |
| | | | | | 1232 | 41284 | CGGCCCCGCCCCCTGATCCGGTCCGGACTCCTAGGCCCGCCCCTACCTAA |
| | | | | | | 582 | |
| | | | | | 1233 | 26348 | CGCAAGTCATCACTGCAAAGCCTGGCCCAGCCATGGGAACAACTGCATTC |
| | | | | | | 74 | |
| | | | | | 1234 | 10162 | CTTCCCCAGCGTGGGGCGGAGCTCGTGGTGCTGGCCTGGAGGGACACACG |
| | | | | | | 79 | |
| | | | | | 1235 | 44318 | CGGTATTGGGAGAAAGTGAGGCACCTACAGGCTAAACCTGTGGCCAAACA |
| | | | | | | 844 | |
| | | | | | 1236 | 46999 | ACGCAGACCCCAGCTCAAGGCTGCACCGTTGCCATGGAGACGGTTGGGCG |
| | | | | | | 224 | |
| | | | | | 1237 | 88928 | CGAGCAGCCACTCTTGGAGAAATGGGGAATGGCGCTGTAAAAGCGCAGGC |
| | | | | | | 839 | |
| | | | | | 1238 | 11512 | TCATCTCTGAACCAGATACTAAAAATCCTCCAGGCGAGTGGAGAGGACCG |
| | | | | | | 9801 | |
| | | | | | 1239 | 37246 | CGCCAACCCTGAAGGTACGTCCCTCGCTCGGGTTTGCCCGTCCGTCCTTC |
| | | | | | | 827 | |
| | | | | | 1240 | 38035 | TCAGGGATGTGGACGATGGCCATCCCAAGACTGCCCCAGCCAAGGCACCG |
| | | | | | | 999 | |
| | | | | | 1241 | 95354 | GCTGCCTCCACTCTAGGATACAGATTCAGATTTTGGGAACCTGGGGTGCG |
| | | | | | | 741 | |
| | | | | | 1242 | 19617 | AAGCGCTTGCTTACGTAGCTGCGGAGCGAGCCTCTGCTTCATTACGAGCG |
| | | | | | | 873 | |
| | | | | | 1243 | 95026 | CGCCTCACGTCTGGCCTTGCAGAAGTCCGGAGTTCCGGCTCTGAACTGGA |
| | | | | | | 073 | |
| | | | | | 1244 | 19313 | TCCGGCAGGGAGCGGACCGTGGTGGAGGCCTCTGAGCCGAGCAGGCCACG |
| | | | | | | 76 | |
| | | | | | 1245 | 85824 | CGCGTATCTGAGAGCAACGTCTTTATCATCAGCACGGTGCGTTCCCTGCA |
| | | | | | | 216 | |
| | | | | | 1246 | 13412 | CGCCTTGCAGCGCAGCTCGGATCAGCAGCAGCCCAGGAGGCCTCCCGCCC |
| | | | | | | 5022 | |
| | | | | | 1247 | 26273 | TTACTTGGAGCTGGTGTACTTGGTGACCGCCTTGGTGCCCTCCGACACCG |
| | | | | | | 535 | |
| | | | | | 1248 | 63463 | TGAACCCCTCAAGTTTATAAATCACTTGGTAATCTTGGCCCTGCTTTTCG |
| | | | | | | 421 | |
| | | | | | 1249 | 10091 | AGAGCAAACGTCAGGGATTATTATGTCGATTTTCCGAGGACCAGGGTTCG |
| | | | | | | 1687 | |
| | | | | | 1250 | 31716 | CACTTAGCTAAAGCCATTTCCTATGCTCCTTCCAGACAGGTTTTGCAACG |
| | | | | | | 64 | |
| | | | | | 1251 | 32713 | CCATGGGTCTTTGGGTGTTGGAATAAAACCCAAACTGGACAAAGAGCTCG |
| | | | | | | 464 | |
| | | | | | 1252 | 27513 | TGAATGTCATCGAAGAAGCTCCTGATTTAGATTTTAACTGTACGTAAACG |
| | | | | | | 092 | |
| | | | | | 1253 | 21251 | CGGCCCTGCGCAGCTGCCCCATGTGCCAGAAGGAGTTCGCCCCCAGGTGA |
| | | | | | | 22 | |
| | | | | | 1254 | 11353 | TCAAATGGTGAAATCTGAGCTTCCAAAAATACCTACTGTCGAGCACCTCG |
| | | | | | | 7807 | |
| | | | | | 1255 | 20735 | CGCCCCGCAAGCGGGTCGGGCCCGCCCCAACAGCCCTCGGCTCTCCTCTC |
| | | | | | | 532 | |
| | | | | | 1256 | 13702 | ACAAGGTACCATCTCATGGCCTCTTGGTTCAAATCCGTTTTCTTGCTCCG |
| | | | | | | 8604 | |
| | | | | | 1257 | 26624 | CGCCTCTCCCGCCCGTGGGATGTCAGGTCTGTTGTCAGGCCCACGAAGGC |
| | | | | | | 667 | |
| | | | | | 1258 | 77734 | ATTAATCTATATCAAAAGGTCAGTCCTTAAGGGGTCTGCTCCATTTCTCG |
| | | | | | | 490 | |
| | | | | | 1259 | 60076 | GTAGGCAAGCGCAGGGGGCGGGCGGCCGAGGAGCGCTTTCGAATTAATCG |
| | | | | | | 70 | |
| | | | | | 1260 | 26758 | CTGGAGAATGCAGACGTGGATCCTGCAGGCCGCTGCCTCCCAAGTGAGCG |
| | | | | | | 166 | |
| | | | | | 1261 | 11205 | CGGCGCCAGGGCCCCCTCAGCGCTGCTCCTGGGCAGTCTCTGTGTCCTCC |
| | | | | | | 8304 | |
| | | | | | 1262 | 45098 | GCAGGGCTTCTATACCAGCAAGATTCATAAGCATGAGCAGATTTGATTCG |
| | | | | | | 028 | |
| | | | | | 1263 | 81188 | CGCCGGGACACAGGCTCACCTTCCTGAGCCCAGGCCACTGGGACCAAGCT |
| | | | | | | 405 | |
| | | | | | 1264 | 91036 | AGTGTGGCGACCTGGCAGCTGCAGCGGGACTCAGCTTTTGGGAACTGTCG |
| | | | | | | 888 | |
| | | | | | 1265 | 13662 | GGATTTGGTCTAGGCTTTCTGGCTTGGCCCTGGAACTCTCAGCAAGGACG |
| | | | | | | 9694 | |
| | | | | | 1266 | 68122 | CGTCCGGGGTTCGGCTGCCTCGACCTGCCCGATTTTCCGCTGCCCCCAAC |
| | | | | | | 139 | |
| | | | | | 1267 | 78176 | CGCAGCAAAACTTAGTTGAGTAGAAATAAGCTCCCGTATGAACACCGGGC |
| | | | | | | 622 | |
| | | | | | 1268 | 22518 | CTGATGAGCAGCTTGCCCGCGTAGGCGGTGGGCACGCAGCAGGGTGGGCG |
| | | | | | | 37 | |
| | | | | | 1269 | 46925 | AGTTCGAACTACTGGGGGAACTCAAGACTGCGTGCCTTAGACCTATCCCG |
| | | | | | | 181 | |
| | | | | | 1270 | 38821 | CGCGCAGACCGAGCAGACTGCCGCAGCGACTCATCCTATCGATAAGGTTC |
| | | | | | | 429 | |
| | | | | | 1271 | 27772 | CGCTGCGTCTTCTGCGGCGCAAATCTTTCGACCCTCTGCGCTCTGCCGGG |
| | | | | | | 805 | |
| | | | | | 1272 | 55243 | CGCTGAGTAATAAGTGTGAAGTTTAGAACACAAACCTTGCAAGAGCTTTC |
| | | | | | | 181 | |
| | | | | | 1273 | 15668 | AGCCGGGAAGGGGCGGGCCCTGGCTGCGGGAAGCCCCGTGGAGGGTAGCG |
| | | | | | | 60 | |
| | | | | | 1274 | 11030 | CGCCACGCGCACCAGATCGCGCTGCAGCAGCACTGCCTGGCGCCACCCCA |
| | | | | | | 1075 | |
| | | | | | 1275 | 36872 | CGCCCCACCCCCTGCCGCCTGCGGGCATCGCTTTATGACGTCACCACGTG |
| | | | | | | 048 | |
| | | | | | 1276 | 11023 | CGGGGCTCGGCCTCGCCAGCTTCCCTACCCAGCCCTGAGGCTCCACGAGT |
| | | | | | | 0252 | |
| | | | | | 1277 | 40618 | CGGAAGGTCTGGGAACTGGGAGCAGGAAAAATGAAAGCCGCCTATCTCCA |
| | | | | | | 356 | |
| | | | | | 1278 | 14713 | GTGTCAACAGGGCCAAGAGGATCCAGAAGAGTGGGCCTGCACTCTTTTCG |
| | | | | | | 9563 | |
| | | | | | 1279 | 15847 | CGGCCCTCACCCTGTTTTTGGTGTGGAATTCATCAGCCAGAGTGAAAGAG |
| | | | | | | 5854 | |
| | | | | | 1280 | 15169 | CGGCCAGAGAAATGGGCCGAAATTACTGCCAGACACATCCGACCTTAGTA |
| | | | | | | 4320 | |
| | | | | | 1281 | 15018 | CATTCGTGCTATTATAAATCAAACAGCAACAGGGCATGATTAAACACACG |
| | | | | | | 3516 | |
| | | | | | 1282 | 87967 | AATTGATCAGAAGTTAGACCGGAGGCTCTGTCAAGTCACGGCCACGGCCG |
| | | | | | | 845 | |
| | | | | | 1283 | 32223 | TTCTTCCCTGTGACTCAGCCCTGGAGGAATTTCCCTTTTGAAATCTTGCG |
| | | | | | | 114 | |
| | | | | | 1284 | 26271 | CGCAGACTAACCGAGAAGAGAGGATTCAAAAATGAAGTGATTCATCCAAT |
| | | | | | | 827 | |
| | | | | | 1285 | 30039 | ATCCCTCAGTCTCCGTCTCCTTTGCACACAGGAGTTGGGAGGCTTCAGCG |
| | | | | | | 113 | |
| | | | | | 1286 | 87038 | CGCCCTTGGACATTACTCTCTGGATACAACGGAGAGTGTGCCAAGGCTTA |
| | | | | | | 972 | |
| | | | | | 1287 | 10485 | CTTTGCCTGAGCCACAAGGGACCGGAGGAATGGGGTTCATTCCCACGCCG |
| | | | | | | 2151 | |
| | | | | | 1288 | 11471 | AATACAAAGTAAGCGAACTGTGCTTCCCCTACAGCTGCAAGCCCAGAGCG |
| | | | | | | 3108 | |
| | | | | | 1289 | 32410 | CATCTTTCACGTGGGGCAGCGGAGGCCTGGCGGGGACGGGGAGCCGCTCG |
| | | | | | | 614 | |
| | | | | | 1290 | 13910 | CGGGCCCTGGCAAAATGGGCTTTTATTCTGCTCAACAACAGGAGGGAAAG |
| | | | | | | 138 | |
| | | | | | 1291 | 15717 | CGCGCGATGCCTAGAAGTGCTCTGGTGTCACTCCCCTGTATAGGACCTGG |
| | | | | | | 8294 | |
| | | | | | 1292 | 18546 | CGCCCTAGAAGCGACCTGAATGGAAAAATCTGCACACGAACTAATGGGTT |
| | | | | | | 2408 | |
| | | | | | 1293 | 91295 | GCGGGCGGGGCATGGGGGTGGTCTGCGCGCTCTGGGCGGGCTGCAGAGCG |
| | | | | | | 346 | |
| | | | | | 1294 | 14852 | GGCCCCGTGGGTCAGGTGTTGCCCCTGAGAGATGAGCAAGGACCGGTCCG |
| | | | | | | 756 | |
| | | | | | 1295 | 23834 | CGCTCTCGGGGGCCTTTGGCTCCAGGCAACTTGGGGCAAGCGTCTCAGTT |
| | | | | | | 860 | |
| | | | | | 1296 | 15717 | CGCCTCTCTCTGTGGAAGACGCGCTTGTCTCAAGCCCCGATGCTCTCAAA |
| | | | | | | 8165 | |
| | | | | | 1297 | 47998 | CGGTCTCAGCTACAACGGCGTGCATGCCAATTACGCCTGCAGGCTACCGC |
| | | | | | | 999 | |
| | | | | | 1298 | 37509 | CCCAAGCAGGTGAGGCGCGGCACAGGGCGGAGACAGGTGAGGGGGCAAC |
| | | | | | | 52 | G |
| | | | | | 1299 | 70150 | CGGCCGAACTCGGCAGCTCCAACCCAACTCGGCTTAACTCCGCCTCACCG |
| | | | | | | 922 | |
| | | | | | 1300 | 11706 | CGGCTGCTCCTACTTCACTGTTCTCTGGCCCCGAGTTTGAGAAGAGGGGG |
| | | | | | | 9780 | |
| | | | | | 1301 | 13702 | AGCCCTCCGAGAAATCGTACGTTCCTCTCACTTACTTTGAGTTGGAAACG |
| | | | | | | 8198 | |
| | | | | | 1302 | 77591 | CGGCTGCGGACCACAAAGACCACAGAATCCCGAAGCCGATTCCTCAGACC |
| | | | | | | 661 | |
| | | | | | 1303 | 13091 | CGGGAAGAAACACAGAATCAAAGTGTTGCTCAAGGGTGCTTTCTGATCCA |
| | | | | | | 949 | |
| | | | | | 1304 | 31375 | CGCGGGTGCTGAACGCGCCCTTCTAAGCTGGTGTGTTAGCACCTGTTCAT |
| | | | | | | 861 | |
| | | | | | 1305 | 44324 | GCATCCCAGTGATTCTTGGGTTCCGCGTGTAGTTTCGGAAGGAGACATCG |
| | | | | | | 747 | |
| | | | | | 1306 | 21666 | TCATCAGAGTTCCCCCTTTTGTTCCAAGTCCCGGAGCAGACAAAGAGGCG |
| | | | | | | 666 | |
| | | | | | 1307 | 22093 | CGGGCCTCGTCCCTTAATTCTAGAAATAGCGATCGCGAAAGCTAAGTGCC |
| | | | | | | 960 | |
| | | | | | 1308 | 30923 | TAATTATCCCTAATGAGGGCCCAGCCCCGGAGCTTGTTAAAGGATTTCCG |
| | | | | | | 306 | |
| | | | | | 1309 | 18232 | CGCCCCAAGATAAGTTAGTTTCCCTGGCAGATTTCCAGCGAGCTGGCTCT |
| | | | | | | 2749 | |
| | | | | | 1310 | 86383 | CGCCGGCTGTCACCCGCACCGGATCTGCTTCCAGGGCTTGGTTTCGCTTT |
| | | | | | | 255 | |
| | | | | | 1311 | 19152 | CGAGGTTGGGCCTTTGCCTGAATCTGTTGCTATTGCTCCCCTTGCTACCG |
| | | | | | | 073 | |
| | | | | | 1312 | 79815 | ATCTGCGTGGGACACAGTGACTCCTAGAAGGGTATCCCAGGATTTTAGCG |
| | | | | | | 639 | |
| | | | | | 1313 | 43276 | CGCCGCTGCGGCTCAGTTCCGCCCCCTCCGCAGGCTCCACCCACGGCTCA |
| | | | | | | 570 | |
| | | | | | 1314 | 91295 | CGCTCCAGCGCTCTGCAGCCCGCCCAGAGCGCGCAGACCACCCCCATGCC |
| | | | | | | 338 | |
| | | | | | 1315 | 23997 | CGGGAAGCCTTTCTGCCGCCCAGGCCCACAGGTCTCGAGACGCACATGCA |
| | | | | | | 4654 | |
| | | | | | 1316 | 20692 | GATGACGCTTGATTGTCTGAAGTCCCCACTTCGTTCTGCCTCCGGAGACG |
| | | | | | | 092 | |
| | | | | | 1317 | 68084 | AATGCGCTCTCCAAATGGGGAGTCTGTTGGGGAGGCCCTGGCGGGAGCCG |
| | | | | | | 453 | |
| | | | | | 1318 | 11353 | CGACGCCTGCAGCTTCTCTGGCTTCCGTCCAGCCACGCTAACTGTCACAA |
| | | | | | | 996 | |
| | | | | | 1319 | 38821 | ACAGTTCCATTCTTTTCCCATCCTCCACCTTGGCTAACTGAACCTTATCG |
| | | | | | | 390 | |
| | | | | | 1320 | 86383 | GGGGATTTGCGTTTGGGGGTCAGCATATCCTCGCACTCTCCCAACATTCG |
| | | | | | | 713 | |
| | | | | | 1321 | 92525 | TTGCTGTTATTACACACACAGGCCTTCCTGTCTGGTCGTTAGAAAAGCCG |
| | | | | | | 005 | |
| | | | | | 1322 | 50816 | AGGGGAGCCTTCCCATTTTTCTGGCCTCAAAAGTAAAGCAGCATTAGACG |
| | | | | | | 963 | |
| | | | | | 1323 | 17694 | CGGGGAGCCCCGCAGAGCAAAACCAAGGAAGATGTCTTCTCTGCTCGTCT |
| | | | | | | 80 | |
| | | | | | 1324 | 19146 | CGGCAAAGCTACAGAGGGAAACTAAGTCACTCGCCTGCAAAACGAGGTTT |
| | | | | | | 441 | |
| | | | | | 1325 | 78173 | CGCAGGTTTGTCCCCAGTTGATAGTTCCGTGAGTTCCTCAATTATTCCTC |
| | | | | | | 200 | |
| | | | | | 1326 | 11513 | CGCGCCCCACTCCGCCCAAGGGGAGAGCCCCACGGACCATTGTGGCTTGC |
| | | | | | | 6258 | |
| | | | | | 1298 | 37509 | CCCAAGCAGGTGAGGCGCGGCACAGGGCGGAGACAGGTGAGGGGGCAAC |
| | | | | | | 52 | G |
| | | | | | 1299 | 70150 | CGGCCGAACTCGGCAGCTCCAACCCAACTCGGCTTAACTCCGCCTCACCG |
| | | | | | | 922 | |
| | | | | | 1300 | 11706 | CGGCTGCTCCTACTTCACTGTTCTCTGGCCCCGAGTTTGAGAAGAGGGGG |
| | | | | | | 9780 | |
| | | | | | 1301 | 8198 | AGCCCTCCGAGAAATCGTACGTTCCTCTCACTTACTTTGAGTTGGAAACG |
| | | | | | | 13702 | |
| | | | | | 1302 | 77591 | CGGCTGCGGACCACAAAGACCACAGAATCCCGAAGCCGATTCCTCAGACC |
| | | | | | | 661 | |
| | | | | | 1303 | 13091 | CGGGAAGAAACACAGAATCAAAGTGTTGCTCAAGGGTGCTTTCTGATCCA |
| | | | | | | 949 | |
| | | | | | 1304 | 31375 | CGCGGGTGCTGAACGCGCCCTTCTAAGCTGGTGTGTTAGCACCTGTTCAT |
| | | | | | | 861 | |
| | | | | | 1305 | 44324 | GCATCCCAGTGATTCTTGGGTTCCGCGTGTAGTTTCGGAAGGAGACATCG |
| | | | | | | 747 | |
| | | | | | 1306 | 21666 | TCATCAGAGTTCCCCCTTTTGTTCCAAGTCCCGGAGCAGACAAAGAGGCG |
| | | | | | | 666 | |
| | | | | | 1307 | 22093 | CGGGCCTCGTCCCTTAATTCTAGAAATAGCGATCGCGAAAGCTAAGTGCC |
| | | | | | | 960 | |
| | | | | | 1308 | 30923 | TAATTATCCCTAATGAGGGCCCAGCCCCGGAGCTTGTTAAAGGATTTCCG |
| | | | | | | 306 | |
| | | | | | 1309 | 18232 | CGCCCCAAGATAAGTTAGTTTCCCTGGCAGATTTCCAGCGAGCTGGCTCT |
| | | | | | | 2749 | |
| | | | | | 1310 | 86383 | CGCCGGCTGTCACCCGCACCGGATCTGCTTCCAGGGCTTGGTTTCGCTTT |
| | | | | | | 255 | |
| | | | | | 1311 | 19152 | CGAGGTTGGGCCTTTGCCTGAATCTGTTGCTATTGCTCCCCTTGCTACCG |
| | | | | | | 073 | |
| | | | | | 1312 | 79815 | ATCTGCGTGGGACACAGTGACTCCTAGAAGGGTATCCCAGGATTTTAGCG |
| | | | | | | 639 | |
| | | | | | 1313 | 43276 | CGCCGCTGCGGCTCAGTTCCGCCCCCTCCGCAGGCTCCACCCACGGCTCA |
| | | | | | | 570 | |
| | | | | | 1314 | 91295 | CGCTCCAGCGCTCTGCAGCCCGCCCAGAGCGCGCAGACCACCCCCATGCC |
| | | | | | | 338 | |
| | | | | | 1315 | 23997 | CGGGAAGCCTTTCTGCCGCCCAGGCCCACAGGTCTCGAGACGCACATGCA |
| | | | | | | 4654 | |
| | | | | | 1316 | 20692 | GATGACGCTTGATTGTCTGAAGTCCCCACTTCGTTCTGCCTCCGGAGACG |
| | | | | | | 092 | |
| | | | | | 1317 | 68084 | AATGCGCTCTCCAAATGGGGAGTCTGTTGGGGAGGCCCTGGCGGGAGCCG |
| | | | | | | 453 | |
| | | | | | 1318 | 11353 | CGACGCCTGCAGCTTCTCTGGCTTCCGTCCAGCCACGCTAACTGTCACAA |
| | | | | | | 996 | |
| | | | | | 1319 | 38821 | ACAGTTCCATTCTTTTCCCATCCTCCACCTTGGCTAACTGAACCTTATCG |
| | | | | | | 390 | |
| | | | | | 1320 | 86383 | GGGGATTTGCGTTTGGGGGTCAGCATATCCTCGCACTCTCCCAACATTCG |
| | | | | | | 713 | |
| | | | | | 1321 | 92525 | TTGCTGTTATTACACACACAGGCCTTCCTGTCTGGTCGTTAGAAAAGCCG |
| | | | | | | 005 | |
| | | | | | 1322 | 50816 | AGGGGAGCCTTCCCATTTTTCTGGCCTCAAAAGTAAAGCAGCATTAGACG |
| | | | | | | 963 | |
| | | | | | 1323 | 17694 | CGGGGAGCCCCGCAGAGCAAAACCAAGGAAGATGTCTTCTCTGCTCGTCT |
| | | | | | | 80 | |
| | | | | | 1324 | 19146 | CGGCAAAGCTACAGAGGGAAACTAAGTCACTCGCCTGCAAAACGAGGTTT |
| | | | | | | 441 | |
| | | | | | 1325 | 78173 | CGCAGGTTTGTCCCCAGTTGATAGTTCCGTGAGTTCCTCAATTATTCCTC |
| | | | | | | 200 | |
| | | | | | 1326 | 11513 | CGCGCCCCACTCCGCCCAAGGGGAGAGCCCCACGGACCATTGTGGCTTGC |
| | | | | | | 6258 | |
| | | | | | 1298 | 37509 | CCCAAGCAGGTGAGGCGCGGCACAGGGCGGAGACAGGTGAGGGGGCAAC |
| | | | | | | 52 | G |
| | | | | | 1299 | 70150 | CGGCCGAACTCGGCAGCTCCAACCCAACTCGGCTTAACTCCGCCTCACCG |
| | | | | | | 922 | |
| | | | | | 1300 | 11706 | CGGCTGCTCCTACTTCACTGTTCTCTGGCCCCGAGTTTGAGAAGAGGGGG |
| | | | | | | 9780 | |
| | | | | | 1301 | 13702 | AGCCCTCCGAGAAATCGTACGTTCCTCTCACTTACTTTGAGTTGGAAACG |
| | | | | | | 8198 | |
| | | | | | 1302 | 77591 | CGGCTGCGGACCACAAAGACCACAGAATCCCGAAGCCGATTCCTCAGACC |
| | | | | | | 661 | |
| | | | | | 1303 | 13091 | CGGGAAGAAACACAGAATCAAAGTGTTGCTCAAGGGTGCTTTCTGATCCA |
| | | | | | | 949 | |
| | | | | | 1304 | 31375 | CGCGGGTGCTGAACGCGCCCTTCTAAGCTGGTGTGTTAGCACCTGTTCAT |
| | | | | | | 861 | |
| | | | | | 1305 | 44324 | GCATCCCAGTGATTCTTGGGTTCCGCGTGTAGTTTCGGAAGGAGACATCG |
| | | | | | | 747 | |
| | | | | | 1306 | 21666 | TCATCAGAGTTCCCCCTTTTGTTCCAAGTCCCGGAGCAGACAAAGAGGCG |
| | | | | | | 666 | |
| | | | | | 1307 | 22093 | CGGGCCTCGTCCCTTAATTCTAGAAATAGCGATCGCGAAAGCTAAGTGCC |
| | | | | | | 960 | |
| | | | | | 1308 | 30923 | TAATTATCCCTAATGAGGGCCCAGCCCCGGAGCTTGTTAAAGGATTTCCG |
| | | | | | | 306 | |
| | | | | | 1309 | 18232 | CGCCCCAAGATAAGTTAGTTTCCCTGGCAGATTTCCAGCGAGCTGGCTCT |
| | | | | | | 2749 | |
| | | | | | 1310 | 86383 | CGCCGGCTGTCACCCGCACCGGATCTGCTTCCAGGGCTTGGTTTCGCTTT |
| | | | | | | 255 | |
| | | | | | 1311 | 19152 | CGAGGTTGGGCCTTTGCCTGAATCTGTTGCTATTGCTCCCCTTGCTACCG |
| | | | | | | 073 | |
| | | | | | 1312 | 79815 | ATCTGCGTGGGACACAGTGACTCCTAGAAGGGTATCCCAGGATTTTAGCG |
| | | | | | | 639 | |
| | | | | | 1313 | 43276 | CGCCGCTGCGGCTCAGTTCCGCCCCCTCCGCAGGCTCCACCCACGGCTCA |
| | | | | | | 570 | |
| | | | | | 1314 | 91295 | CGCTCCAGCGCTCTGCAGCCCGCCCAGAGCGCGCAGACCACCCCCATGCC |
| | | | | | | 338 | |
| | | | | | 1315 | 23997 | CGGGAAGCCTTTCTGCCGCCCAGGCCCACAGGTCTCGAGACGCACATGCA |
| | | | | | | 4654 | |
| | | | | | 1316 | 20692 | GATGACGCTTGATTGTCTGAAGTCCCCACTTCGTTCTGCCTCCGGAGACG |
| | | | | | | 092 | |
| | | | | | 1317 | 68084 | AATGCGCTCTCCAAATGGGGAGTCTGTTGGGGAGGCCCTGGCGGGAGCCG |
| | | | | | | 453 | |
| | | | | | 1318 | 11353 | CGACGCCTGCAGCTTCTCTGGCTTCCGTCCAGCCACGCTAACTGTCACAA |
| | | | | | | 996 | |
| | | | | | 1319 | 38821 | ACAGTTCCATTCTTTTCCCATCCTCCACCTTGGCTAACTGAACCTTATCG |
| | | | | | | 390 | |
| | | | | | 1320 | 86383 | GGGGATTTGCGTTTGGGGGTCAGCATATCCTCGCACTCTCCCAACATTCG |
| | | | | | | 713 | |
| | | | | | 1321 | 92525 | TTGCTGTTATTACACACACAGGCCTTCCTGTCTGGTCGTTAGAAAAGCCG |
| | | | | | | 005 | |
| | | | | | 1322 | 50816 | AGGGGAGCCTTCCCATTTTTCTGGCCTCAAAAGTAAAGCAGCATTAGACG |
| | | | | | | 963 | |
| | | | | | 1323 | 17694 | CGGGGAGCCCCGCAGAGCAAAACCAAGGAAGATGTCTTCTCTGCTCGTCT |
| | | | | | | 80 | |
| | | | | | 1324 | 19146 | CGGCAAAGCTACAGAGGGAAACTAAGTCACTCGCCTGCAAAACGAGGTTT |
| | | | | | | 441 | |
| | | | | | 1325 | 78173 | CGCAGGTTTGTCCCCAGTTGATAGTTCCGTGAGTTCCTCAATTATTCCTC |
| | | | | | | 200 | |
| | | | | | 1326 | 11513 | CGCGCCCCACTCCGCCCAAGGGGAGAGCCCCACGGACCATTGTGGCTTGC |
| | | | | | | 6258 | |
| | | | | | 1298 | 37509 | CCCAAGCAGGTGAGGCGCGGCACAGGGCGGAGACAGGTGAGGGGGCAAC |
| | | | | | | 52 | G |
| | | | | | 1299 | 70150 | CGGCCGAACTCGGCAGCTCCAACCCAACTCGGCTTAACTCCGCCTCACCG |
| | | | | | | 922 | |
| | | | | | 1300 | 11706 | CGGCTGCTCCTACTTCACTGTTCTCTGGCCCCGAGTTTGAGAAGAGGGGG |
| | | | | | | 9780 | |
| | | | | | 1301 | 13702 | AGCCCTCCGAGAAATCGTACGTTCCTCTCACTTACTTTGAGTTGGAAACG |
| | | | | | | 19 | |
| | | | | | 1302 | 77591 | CGGCTGCGGACCACAAAGACCACAGAATCCCGAAGCCGATTCCTCAGACC |
| | | | | | | 661 | |
| | | | | | 1303 | 13091 | CGGGAAGAAACACAGAATCAAAGTGTTGCTCAAGGGTGCTTTCTGATCCA |
| | | | | | | 949 | |
| | | | | | 1304 | 31375 | CGCGGGTGCTGAACGCGCCCTTCTAAGCTGGTGTGTTAGCACCTGTTCAT |
| | | | | | | 861 | |
| | | | | | 1305 | 44324 | GCATCCCAGTGATTCTTGGGTTCCGCGTGTAGTTTCGGAAGGAGACATCG |
| | | | | | | 747 | |
| | | | | | 1306 | 21666 | TCATCAGAGTTCCCCCTTTTGTTCCAAGTCCCGGAGCAGACAAAGAGGCG |
| | | | | | | 666 | |
| | | | | | 1307 | 22093 | CGGGCCTCGTCCCTTAATTCTAGAAATAGCGATCGCGAAAGCTAAGTGCC |
| | | | | | | 960 | |
| | | | | | 1308 | 30923 | TAATTATCCCTAATGAGGGCCCAGCCCCGGAGCTTGTTAAAGGATTTCCG |
| | | | | | | 306 | |
| | | | | | 1309 | 18232 | CGCCCCAAGATAAGTTAGTTTCCCTGGCAGATTTCCAGCGAGCTGGCTCT |
| | | | | | | 2749 | |
| | | | | | 1310 | 86383 | CGCCGGCTGTCACCCGCACCGGATCTGCTTCCAGGGCTTGGTTTCGCTTT |
| | | | | | | 255 | |
| | | | | | 1311 | 19152 | CGAGGTTGGGCCTTTGCCTGAATCTGTTGCTATTGCTCCCCTTGCTACCG |
| | | | | | | 073 | |
| | | | | | 1312 | 79815 | ATCTGCGTGGGACACAGTGACTCCTAGAAGGGTATCCCAGGATTTTAGCG |
| | | | | | | 639 | |
| | | | | | 1313 | 43276 | CGCCGCTGCGGCTCAGTTCCGCCCCCTCCGCAGGCTCCACCCACGGCTCA |
| | | | | | | 570 | |
| | | | | | 1314 | 91295 | CGCTCCAGCGCTCTGCAGCCCGCCCAGAGCGCGCAGACCACCCCCATGCC |
| | | | | | | 338 | |
| | | | | | 1315 | 23997 | CGGGAAGCCTTTCTGCCGCCCAGGCCCACAGGTCTCGAGACGCACATGCA |
| | | | | | | 4654 | |
| | | | | | 1316 | 20692 | GATGACGCTTGATTGTCTGAAGTCCCCACTTCGTTCTGCCTCCGGAGACG |
| | | | | | | 092 | |
| | | | | | 1317 | 68084 | AATGCGCTCTCCAAATGGGGAGTCTGTTGGGGAGGCCCTGGCGGGAGCCG |
| | | | | | | 453 | |
| | | | | | 1318 | 11353 | CGACGCCTGCAGCTTCTCTGGCTTCCGTCCAGCCACGCTAACTGTCACAA |
| | | | | | | 996 | |
| | | | | | 1319 | 38821 | ACAGTTCCATTCTTTTCCCATCCTCCACCTTGGCTAACTGAACCTTATCG |
| | | | | | | 390 | |
| | | | | | 1320 | 86383 | GGGGATTTGCGTTTGGGGGTCAGCATATCCTCGCACTCTCCCAACATTCG |
| | | | | | | 713 | |
| | | | | | 1321 | 92525 | TTGCTGTTATTACACACACAGGCCTTCCTGTCTGGTCGTTAGAAAAGCCG |
| | | | | | | 005 | |
| | | | | | 1322 | 50816 | AGGGGAGCCTTCCCATTTTTCTGGCCTCAAAAGTAAAGCAGCATTAGACG |
| | | | | | | 963 | |
| | | | | | 1323 | 17694 | CGGGGAGCCCCGCAGAGCAAAACCAAGGAAGATGTCTTCTCTGCTCGTCT |
| | | | | | | 80 | |
| | | | | | 1324 | 19146 | CGGCAAAGCTACAGAGGGAAACTAAGTCACTCGCCTGCAAAACGAGGTTT |
| | | | | | | 441 | |
| | | | | | 1325 | 78173 | CGCAGGTTTGTCCCCAGTTGATAGTTCCGTGAGTTCCTCAATTATTCCTC |
| | | | | | | 200 | |
| | | | | | 1326 | 11513 | CGCGCCCCACTCCGCCCAAGGGGAGAGCCCCACGGACCATTGTGGCTTGC |
| | | | | | | 6258 | |
| | | | | | 1298 | 37509 | CCCAAGCAGGTGAGGCGCGGCACAGGGCGGAGACAGGTGAGGGGGCAAC |
| | | | | | | 52 | G |
| | | | | | 1299 | 70150 | CGGCCGAACTCGGCAGCTCCAACCCAACTCGGCTTAACTCCGCCTCACCG |
| | | | | | | 922 | |
| | | | | | 1300 | 11706 | CGGCTGCTCCTACTTCACTGTTCTCTGGCCCCGAGTTTGAGAAGAGGGGG |
| | | | | | | 9780 | |
| | | | | | 1301 | 13702 | AGCCCTCCGAGAAATCGTACGTTCCTCTCACTTACTTTGAGTTGGAAACG |
| | | | | | | 8198 | |
| | | | | | 1302 | 77591 | CGGCTGCGGACCACAAAGACCACAGAATCCCGAAGCCGATTCCTCAGACC |
| | | | | | | 661 | |
| | | | | | 1303 | 13091 | CGGGAAGAAACACAGAATCAAAGTGTTGCTCAAGGGTGCTTTCTGATCCA |
| | | | | | | 949 | |
| | | | | | 1304 | 31375 | CGCGGGTGCTGAACGCGCCCTTCTAAGCTGGTGTGTTAGCACCTGTTCAT |
| | | | | | | 861 | |
| | | | | | 1305 | 44324 | GCATCCCAGTGATTCTTGGGTTCCGCGTGTAGTTTCGGAAGGAGACATCG |
| | | | | | | 747 | |
| | | | | | 1306 | 21666 | TCATCAGAGTTCCCCCTTTTGTTCCAAGTCCCGGAGCAGACAAAGAGGCG |
| | | | | | | 666 | |
| | | | | | 1307 | 22093 | CGGGCCTCGTCCCTTAATTCTAGAAATAGCGATCGCGAAAGCTAAGTGCC |
| | | | | | | 960 | |
| | | | | | 1308 | 30923 | TAATTATCCCTAATGAGGGCCCAGCCCCGGAGCTTGTTAAAGGATTTCCG |
| | | | | | | 306 | |
| | | | | | 1309 | 18232 | CGCCCCAAGATAAGTTAGTTTCCCTGGCAGATTTCCAGCGAGCTGGCTCT |
| | | | | | | 2749 | |
| | | | | | 1310 | 86383 | CGCCGGCTGTCACCCGCACCGGATCTGCTTCCAGGGCTTGGTTTCGCTTT |
| | | | | | | 255 | |
| | | | | | 1311 | 19152 | CGAGGTTGGGCCTTTGCCTGAATCTGTTGCTATTGCTCCCCTTGCTACCG |
| | | | | | | 073 | |
| | | | | | 1312 | 79815 | ATCTGCGTGGGACACAGTGACTCCTAGAAGGGTATCCCAGGATTTTAGCG |
| | | | | | | 639 | |
| | | | | | 1313 | 43276 | CGCCGCTGCGGCTCAGTTCCGCCCCCTCCGCAGGCTCCACCCACGGCTCA |
| | | | | | | 570 | |
| | | | | | 1314 | 91295 | CGCTCCAGCGCTCTGCAGCCCGCCCAGAGCGCGCAGACCACCCCCATGCC |
| | | | | | | 338 | |
| | | | | | 1315 | 23997 | CGGGAAGCCTTTCTGCCGCCCAGGCCCACAGGTCTCGAGACGCACATGCA |
| | | | | | | 4654 | |
| | | | | | 1316 | 20692 | GATGACGCTTGATTGTCTGAAGTCCCCACTTCGTTCTGCCTCCGGAGACG |
| | | | | | | 092 | |
| | | | | | 1317 | 68084 | AATGCGCTCTCCAAATGGGGAGTCTGTTGGGGAGGCCCTGGCGGGAGCCG |
| | | | | | | 453 | |
| | | | | | 1318 | 11353 | CGACGCCTGCAGCTTCTCTGGCTTCCGTCCAGCCACGCTAACTGTCACAA |
| | | | | | | 996 | |
| | | | | | 1319 | 38821 | ACAGTTCCATTCTTTTCCCATCCTCCACCTTGGCTAACTGAACCTTATCG |
| | | | | | | 390 | |
| | | | | | 1320 | 86383 | GGGGATTTGCGTTTGGGGGTCAGCATATCCTCGCACTCTCCCAACATTCG |
| | | | | | | 713 | |
| | | | | | 1321 | 92525 | TTGCTGTTATTACACACACAGGCCTTCCTGTCTGGTCGTTAGAAAAGCCG |
| | | | | | | 005 | |
| | | | | | 1322 | 50816 | AGGGGAGCCTTCCCATTTTTCTGGCCTCAAAAGTAAAGCAGCATTAGACG |
| | | | | | | 963 | |
| | | | | | 1323 | 17694 | CGGGGAGCCCCGCAGAGCAAAACCAAGGAAGATGTCTTCTCTGCTCGTCT |
| | | | | | | 80 | |
| | | | | | 1324 | 19146 | CGGCAAAGCTACAGAGGGAAACTAAGTCACTCGCCTGCAAAACGAGGTTT |
| | | | | | | 441 | |
| | | | | | 1325 | 78173 | CGCAGGTTTGTCCCCAGTTGATAGTTCCGTGAGTTCCTCAATTATTCCTC |
| | | | | | | 200 | |
| | | | | | 1326 | 11513 | CGCGCCCCACTCCGCCCAAGGGGAGAGCCCCACGGACCATTGTGGCTTGC |
| | | | | | | 6258 | |
| | | | | | 1327 | 10823 | CGGGCCTCAAGTCCCTGCCCGCCATGCCCCAGGGCCCTCAGCTCCACCAC |
| | | | | | | 8461 | |
| | | | | | 1328 | 40441 | AATAGCGTTACTTGTGCAACACAACATATATAATGGAAAAGGCCGATGCG |
| | | | | | | 216 | |
| | | | | | 1329 | 35384 | GTCGTTGCCATGACACCGCGGGCAGGTGGGCGGCTCTGGCGGCTGTTTCG |
| | | | | | | 669 | |
| | | | | | 1330 | 61881 | CGCGCACCACGTACTGCGCCACCTTGAAGGAGCTCAGGTACTCGTTCATG |
| | | | | | | 20 | |
| | | | | | 1331 | 30037 | CGCCTCCAGACCTCGGTTCCCGCTCCAGCACGTTAAGCAGGGCGCACTCA |
| | | | | | | 833 | |
| | | | | | 1332 | 31498 | CAAGAAGGAGGTCAGCCGGGTGCTGTGCAAGCGGTGCGGTAAGTTCCTCG |
| | | | | | | 256 | |
| | | | | | 1333 | 92979 | GCCCTGGCTCTGGTCTGAGGTTGCCCTTGAACGATTTCGAGGCTCCCTCG |
| | | | | | | 709 | |
| | | | | | 1334 | 15136 | CTTACTTAGCGTGCGAGACAGGCTGGTAGTGCGAGCGGCCAGTGGTGGCG |
| | | | | | | 505 | |
| | | | | | 1335 | 54154 | CGCGGCCTGACCCCCGAGGCAAGGGGTCCCAGGAGTTGACCCTCAAATTG |
| | | | | | | 746 | |
| | | | | | 1336 | 24837 | CGGCCCAGCCGGGAGGCGGCGCACAGCCAACAGCACCCCCACCCCCACCC |
| | | | | | | 892 | |
| | | | | | 1337 | 52300 | CGGCCGCCAGACGTTGCCTACAGTCTCGGCTCTGTCTCCCACGGCTGTGG |
| | | | | | | 911 | |
| | | | | | 1338 | 41071 | GAGCATGCTCAGTTCATATGACTGATTTTCACTAAGTGTAACAATCAACG |
| | | | | | | 405 | |
| | | | | | 1339 | 13012 | CTCAGACCCAGCAGGAAGGGCGAGCGCACTGAGGCTGGGAAACGCAGGC |
| | | | | | | 3952 | G |
| | | | | | 1340 | 89952 | CGCCATGAGTCATGCAAGGACTGGGCGACAGAAGCTCTGAGCTTCTATTT |
| | | | | | | 272 | |
| | | | | | 1341 | 33292 | CGGCGCGGATGCCCCAGCAGCCCCCGCTCCACTACGCCAAGCCCTCGCCC |
| | | | | | | 92 | |
| | | | | | 1342 | 18006 | CGGGCGGGCCGCTGGAGTTTATCAGCTCCAGGACAAATCTGCCTCTGACC |
| | | | | | | 06 | |
| | | | | | 1343 | 10190 | TACCGAGAGACGGCTGTGGGGGAGGCTCCTGCGGGAGAAATGGCCAAACG |
| | | | | | | 6886 | |
| | | | | | 1344 | 39471 | CGGTGACGAAGCTTCGAGCAGCGCCGAACAGCCCCAGCCCCAGCTCCCGC |
| | | | | | | 028 | |
| | | | | | 1345 | 11897 | CGAAGCCTTCTAGATAAATACTGTGTAGAATATGGTGTGGGTGTCATTGG |
| | | | | | | 5504 | |
| | | | | | 1346 | 13665 | CGTGCGCGCTAAAAACCCACTTCAAAGTCTGTTCCCGGCACGGGGGCGGC |
| | | | | | | 6581 | |
| | | | | | 1347 | 81185 | AGTGGTAGGCAGGATGTAGACCAGGGCGGGCGCAGCCCTGGCGCATAGCG |
| | | | | | | 228 | |
| | | | | | 1348 | 81188 | CCTTCCTGAGCCCAGGCCACTGGGACCAAGCTGATACTCAGAAACAGCCG |
| | | | | | | 471 | |
| | | | | | 1349 | 21666 | TCTGCTGTCAGGCCGGGAAAAAGTGTCCGAACGCCTCGTGGACTGCAGCG |
| | | | | | | 834 | |
| | | | | | 1350 | 47468 | CGCTCTGTCTGTTCGGAACAGATGTCGGCCCTCGGAGGGGTTTCTCTGCC |
| | | | | | | 154 | |
| | | | | | 1351 | 67326 | CGCTCCGCGGCGGAGGCGACCCAGTTTCCCAGCTCTCGTCCTCGCCACTT |
| | | | | | | 082 | |
| | | | | | 1352 | 14060 | CGAAGCTCACCGTGCCAGCCTATGTACTGTTTTCGTCTTATCCTGTAGCG |
| | | | | | | 2851 | |
| | | | | | 1353 | 26598 | ACCTGGCGCTCAAAGGCGAGGTGCTCGCTGAGGTGGGACCAGGTGAAACG |
| | | | | | | 502 | |
| | | | | | 1354 | 41158 | CGTAGTTACTTGTATTGCTTTACATTTGCTCGTCCCAGTGTGTGAGGGCC |
| | | | | | | 986 | |
| | | | | | 1355 | 19788 | CTGTGGTACCAAAGGATCTACACAGCTATGTTTGGCCGAAATAATTTCCG |
| | | | | | | 7955 | |
| | | | | | 1356 | 67134 | AATTTGGTGCACAAGAGGTGCACAGCAAACGCCTGTGGAATGAGTGAACG |
| | | | | | | 587 | |
| | | | | | 1357 | 29644 | CGAACCTGTACAGAAGACGCTCCCATGGGTGGGCGAGGTAGCTGCCACCC |
| | | | | | | 756 | |
| | | | | | 1358 | 17520 | CGCGAGGAGCAAATGGAACAGCACAAGCTGCCCGCAGCCCGCACCATCGC |
| | | | | | | 0071 | |
| | | | | | 1359 | 13675 | ATATCAAAGCTGGGAGAGACTCCGGCTCTGCATATGAGCGACTCTGTTCG |
| | | | | | | 1656 | |
| | | | | | 1360 | 76101 | GCACATGACCAGAGGCGGCCGGTAATCAGGGCAGAGTCTGGTGTGGACCG |
| | | | | | | 391 | |
| | | | | | 1361 | 10451 | CGGCTGGGTTAATTCATGATGTTTGCCCTTTTAATAAAATATAAGGGTAG |
| | | | | | | 3155 | |
| | | | | | 1362 | 22931 | CGCGTTTCCCGGACAGTGAGGCAGGACCTAAACTCTTCCGTTAACACTAC |
| | | | | | | 73 | |
| | | | | | 1363 | 57345 | CGGAGCTTGTAGCGGGTAGGGACTCCACACACCAGGGAACCCTACAGAAC |
| | | | | | | 71 | |
| | | | | | 1364 | 11513 | CGGGCTCAGGACGCCTAGGCGTCCAAGCTGTGTTCCCCACCGCGCCCCAC |
| | | | | | | 6298 | |
| | | | | | 1365 | 11207 | CAGCCCGCCAGGGTGTCACTGGAGACAGAATGGAGGTGCTGCCGGACTCG |
| | | | | | | 3613 | |
| | | | | | 1366 | 91580 | GTGCTTCCCTCAAAAGGGCATAAAGGCCCCCTTTCTTCTGCTCTCCTGCG |
| | | | | | | 507 | |
| | | | | | 1367 | 14194 | TCATCCCCCCGGGCGCTGAGTCCTTCATGTCCTATGGGCTGTGTAGGACG |
| | | | | | | 3158 | |
| | | | | | 1368 | 32325 | CATAGCATTGCCTGGCTGGGAAGTTCAATGTGTTCACAGCCAATACCACG |
| | | | | | | 334 | |
| | | | | | 1369 | 15600 | CGTGAATACTCTGTGACTGGCTTGCTGAAACACAGCTTGAAATCCCTGTT |
| | | | | | | 8770 | |
| | | | | | 1370 | 53208 | CGGGGTCTGGTGGTGTGCACTCTGCTGCTCCATTTGCTGTCCAGTTGTTT |
| | | | | | | 762 | |
| | | | | | 1371 | 46387 | ACAGAGAGCCGCAGGGGCCGGCTCTGGGTACTGCTGGGGCAGGGCCTCCG |
| | | | | | | 992 | |
| | | | | | 1372 | 73247 | CGGGCATACGCTGTTTTCTGTATATGGGTTTACCCTCCAACCCATATACA |
| | | | | | | 613 | |
| | | | | | 1373 | 28549 | CTGTCCTTCCCTGAGCAGCCGGGCCTAGAGTCAAGGCGCGATGATTGCCG |
| | | | | | | 922 | |
| | | | | | 1374 | 50556 | CGGCTCACAGTGTTCCAGACCCCCCTTAAGGGTGAAGCCCCAGGGTGCCC |
| | | | | | | 917 | |
| | | | | | 1375 | 11513 | GTCTAGAATCAATACGGCCCAGACAGCCCTTCACAAAGGGGCTCCAGGCG |
| | | | | | | 6060 | |
| | | | | | 1376 | 14953 | CGCCAGCCGCCAGCTGCTGAGTCACTTTTGTCAAAGAGTGGCCTCGGCCC |
| | | | | | | 5695 | |
| | | | | | 1377 | 18592 | GTGAAGCATCTCATAAACCACTGCCTTTCTGATATTGGTCTCTTTGTTCG |
| | | | | | | 5146 | |
| | | | | | 1378 | 17013 | GACTCAGTTCCTATTAGGTGTTCCGGTTTGTTCATTCTCAAAGGGACCCG |
| | | | | | | 7321 | |
| | | | | | 1379 | 11356 | CGTTGAGAGGACGTCAACGAATCTATTTGTTGGGCTGAATCCTTCCCCAG |
| | | | | | | 8090 | |
| | | | | | 1380 | 13781 | GTTTCTGGCGAGCAGGAGTGTGGCGATCTTGGAGAGCTTGCGCACCGACG |
| | | | | | | 4960 | |
| | | | | | 1381 | 24769 | CTCGGCGCGGTCTTGGTCTGGGTCGGTGGGGTTGGGCCGGGAGACCCGCG |
| | | | | | | 4271 | |
| | | | | | 1382 | 44324 | CGCCTACGCACTCGGAGCACAGGTTACAACTTCCAGAAACCCTTGGGACG |
| | | | | | | 951 | |
| | | | | | 1383 | 36021 | ACAATTTCAAGTGTTGACAGCATCTGCTAAGTCTTCAGAATCTCAGCTCG |
| | | | | | | 943 | |
| | | | | | 1384 | 42955 | GAGGCAGAGCTGCCTCCACACCCGGTGCCAGGGGGTTGGGGTTGGCAGCG |
| | | | | | | 658 | |
| | | | | | 1385 | 74020 | TCCGGGAACTGGTGCACGCAAGAGCTTAACTGATTTCGCCGCGGTCTGCG |
| | | | | | | 976 | |
| | | | | | 1386 | 11913 | GCATGAGACTCTCTGGTTGTGTTCCGTTCGCACTCAAAGTCCTCGAATCG |
| | | | | | | 4684 | |
| | | | | | 1387 | 32138 | CCAGCAGCCCAAGACAGCATGAGAGGTGCTAGCCCAAATATTGACCTACG |
| | | | | | | 937 | |
| | | | | | 1388 | 35479 | CGCAGCCCACACCCTGGGGGTCCACCCGGGCTCTGCACCCCGCCCACCTC |
| | | | | | | 910 | |
| | | | | | 1389 | 10111 | GACGGATTTGCAAAAGCAGGCGAGTCGTGCAGAGGCTCCTAAAATGCCCG |
| | | | | | | 1261 | |
| | | | | | 1390 | 14034 | GGGAGGGCCTACGGAGGGAGCGGCCCCAGGCGCTTTCTAGAGCGTGAGCG |
| | | | | | | 6236 | |
| | | | | | 1391 | 36977 | GAGATTTCAAGTGTCCACACTTCTAGTTTAGACATTTGGCAACCAATTCG |
| | | | | | | 887 | |
| | | | | | 1392 | 14709 | CGCGTTCAAAGATTTTGTTTTCACGGCTGAGGGGGCTTTTTTCCAATGTA |
| | | | | | | 8568 | |
| | | | | | 1393 | 10090 | CGCAGAAAGGGAGCCCACTGAGACCGCAGGGGCTGACAAATCACTGCTAA |
| | | | | | | 9443 | |
| | | | | | 1394 | 54935 | GACCTGAGCCACTGCACCCGGCTAAGCGTTCCTTTTTTTAAAAAAAATCG |
| | | | | | | 605 | |
| | | | | | 1395 | 24583 | CGATGTTAGGGGCGTTTTTCATTTTGATGTTGGTTTTTGATATTACCACC |
| | | | | | | 375 | |
| | | | | | 1396 | 92946 | CGCAGGCCACTATAGGAGGCAGAACAGTAAACAGATCATTGAAAAGACCT |
| | | | | | | 825 | |
| | | | | | 1397 | 13867 | TGTTCCAGGCCTGACGGGTGTTCAGGGTGTAGGACTCAGGGTGTAGGACG |
| | | | | | | 9347 | |
| | | | | | 1398 | 32120 | GCCTCTGTACTGCTCTGTAGTCTCTGCTAGGACATGGACGAAAAGGGACG |
| | | | | | | 773 | |
| | | | | | 1399 | 16100 | CTAGCTGGGAGGTGATGGGGACTGCCTGTCATTCCTGTCAGTCTCTCACG |
| | | | | | | 7634 | |
| | | | | | 1400 | 26674 | ATCATTCTCCGGACTTTAAAGGACAAACTAAATGGAGACCCACCAATGCG |
| | | | | | | 046 | |
| | | | | | 1401 | 28549 | TCCACAAAGCTGCCCCCACTTCGTAAGGGCCTGTGCCTGGAGGGTCGTCG |
| | | | | | | 698 | |
| | | | | | 1402 | 67600 | CGGTTGCCGAGCTCTGCCTACCTCTGAAAGGCCTAGAGAGCAGAGTTCTC |
| | | | | | | 707 | |
| | | | | | 1403 | 11381 | CGCTCTTGGGCCAAAAGCGGGATGAGGGGAGGAGCCAAGAGCAGCCAATC |
| | | | | | | 8537 | |
| | | | | | 1404 | 44083 | CTTGACTGAACTAGCTTCTTATCTGTATGATAGAGAAACATGCCAAAGCG |
| | | | | | | 518 | |
| | | | | | 1405 | 20145 | TCCCAGGACTTACAATGTTTGCTAAGACGCAAGAGGGTGTGACACAGACG |
| | | | | | | 0527 | |
| | | | | | 1406 | 17266 | CGCCAATTATTGCAGCGCCGCAGCCCCTTTGTTGATACAGTAGTCCGAAA |
| | | | | | | 5707 | |
| | | | | | 1407 | 12425 | GTTTCACCTCCACTGCCCTGGAGGTAGAACTGGTGGTGAAGGTATCTACG |
| | | | | | | 4360 | |
| | | | | | 1408 | 31883 | CGGCCGCAGTGAGCCAGCTGCAGCCTGGGAGCACAGTGTGAACCTGCCAG |
| | | | | | | 12 | |
| | | | | | 1409 | 20081 | CGGCGCCCAGCCCATCCGACTTTTGTAACACTCAGAATTGTAGTTTTGTT |
| | | | | | | 9113 | |
| | | | | | 1410 | 29254 | CGGGGCAGTTCAGCAACCCCGACCCCACCCGCGTGGCTCCAGGCCCAGGG |
| | | | | | | 680 | |
| | | | | | 1411 | 11328 | CAGAGGGGTGCGGTGGGGCCTAGGAGGCTCGTGGGCGATTCCGAGCACCG |
| | | | | | | 6610 | |
| | | | | | 1412 | 22369 | GAGATTAACGTCACCTCTCCTGCAAGAGCGGTTAAGAGGCAGAATCACCG |
| | | | | | | 485 | |
| | | | | | 1413 | 43276 | CCTTTGTCTCCCAAGTGGAGTGGTTCTAAATTTCTGATAACCAATGAGCG |
| | | | | | | 658 | |
| | | | | | 1414 | 15472 | CGCGGTCCTCCCGCAACACCTGCAGCCCCGCAAGCGAGCGCACTCGGAGC |
| | | | | | | 9059 | |
| | | | | | 1415 | 18546 | TTTCCGTGACAAACCCATTAGTTCGTGTGCAGATTTTTCCATTCAGGTCG |
| | | | | | | 2397 | |
| | | | | | 1416 | 16085 | CTGAGCGCACTCCTTCCACTGTACTGGGGGTGTACAGTGAGGAGTGGACG |
| | | | | | | 180 | |
| | | | | | 1417 | 46906 | GTTCTTAGTCTCCTGTCCCCAAACTTCTTAGAGTTATTCCTGTTGGACCG |
| | | | | | | 32 | |
| | | | | | 1418 | 14627 | CGCAGAAGAGCAGGCTATTGGAGCAATCCGAACCCTGCGCAGCAAAAGAA |
| | | | | | | 8678 | |
| | | | | | 1419 | 17702 | CGGGAATCCCGCACCACGGGGAACTCTCCACCCTGTCCCCGAAGTTTTGG |
| | | | | | | 4294 | |
| | | | | | 1420 | 37388 | GCAGTGGCCGGGGTCTTCTCTGGCCAGATCTGAGGGACCTCTGAGCTGCG |
| | | | | | | 828 | |
| | | | | | 1421 | 91194 | CGACCAAGACTTTTGCCCTTTTGAAATGAAATAGAAATAGGGGAGCTGCA |
| | | | | | | 708 | |
| | | | | | 1422 | 10031 | TCTGCGGCTCTGGCCGGGGGTCGGGGCTGTTATCTGCATGTGTGCGTGCG |
| | | | | | | 8321 | |
| | | | | | 1423 | 29902 | CGGAGTCTGCGAACGGAGTCTCCGCTGCCGCCGCTCAGCCCTCAGTCCTT |
| | | | | | | 2 | |
| | | | | | 1424 | 97171 | CGGCCCGCCCAACTGCTGCCGCCGCATCTGCAGAAACCACTCGTGTTGAG |
| | | | | | | 827 | |
| | | | | | 1425 | 60885 | GGTCTGCCCTTCCTCCCCTGCCGGGGCTACAGGGGTCGAGGGGCTGGGCG |
| | | | | | | 491 | |
| | | | | | 1426 | 13662 | AGGCTGCTCGGGGGTCAGACCTGGCGCTGGCGTTTCTTTCTGCTCTTCCG |
| | | | | | | 9816 | |
| | | | | | 1427 | 43741 | CGCACCCAAAATTGCCCCCAAAGGAGGGTTCAGTGCACGGCGCTCTGGAC |
| | | | | | | 310 | |
| | | | | | 1428 | 14748 | CGGGAGAAATTCTGAGCAGAGCCGTTAGCTGCTCTAACGTTAGAGCGTTA |
| | | | | | | 220 | |
| | | | | | 1429 | 10887 | CGCCTATCTGTTTGGAATTTCGCAAATAAGGAACGTTTAAATGACGTAGT |
| | | | | | | 003 | |
| | | | | | 1430 | 21123 | GCTGAACAACTTAACTCCTTGTCTCATAAAATTTAAGCTGCTATTGATCG |
| | | | | | | 51 | |
| | | | | | 1431 | 15847 | CGGCACCAGGGCTGGATTTATAGCAAGGAGCCCCGACTGTAAGAAGTAAT |
| | | | | | | 8629 | |
| | | | | | 1432 | 20084 | CGCTGCGCATCATCTTCGCCATCGAGAGCACGTTTGTGGGCTCCTGGCTG |
| | | | | | | 2890 | |
| | | | | | 1433 | 78756 | TCTAGGAAGCATCCCATTAGTAGCAATTAAGTCAGGCAAAAGACAGCACG |
| | | | | | | 422 | |
| | | | | | 1434 | 50203 | TGAGTACTCAGGTTGGCGTGGGACAGGGGAGCCGGCTCCCGGGGGCCACG |
| | | | | | | 4 | |
| | | | | | 1435 | 13472 | CACTCAGGCTGGCGTGGGGAGGGACACCCTTTGCATTCGTAAGGACACCG |
| | | | | | | 9942 | |
| | | | | | 1436 | 63504 | CGTGGATGTCTTCATCTGCCAGAGTCAAAGAAAAGGTCAGTGATACTATG |
| | | | | | | 673 | |
| | | | | | 1437 | 89952 | TTCTAAAATGTGGGCTTTCTGTGTACATGGGCGCGCATTCCCAGGACTCG |
| | | | | | | 052 | |
| | | | | | 1438 | 15811 | CGGCTGTGCTTATGTGCGTGTATGAGTTAGCAGCTGTGCACGTGTTTCTG |
| | | | | | | 4558 | |
| | | | | | 1439 | 21199 | CGGCTCCGCGCAGCAGCATCACCCGCACCACCTCGCTGTGGCCCATCTGG |
| | | | | | | 515 | |
| | | | | | 1440 | 68723 | GATTATTGAATAATTGCATAATTCCGAGCGCGGGTTGGGAGGCAATGCCG |
| | | | | | | 690 | |
| | | | | | 1441 | 13858 | CGGGTGCCCACCCTAGAATTAACCCTAGGATGGATGCAATCAGGATTCAG |
| | | | | | | 4567 | |
| | | | | | 1442 | 13735 | CGTAGCCAGCAGAGACCTCCGAGCACCGGCGCCCTCTAAAGCCGAGGTCA |
| | | | | | | 5128 | |
| | | | | | 1443 | 12726 | TTCTCCCAGTGCTTTGTTGACAAATGAACAAGATTTGACACTAACTAGCG |
| | | | | | | 5357 | |
| | | | | | 1444 | 11181 | CTACCTCCAGAGTGTGCCTTACTCCATCCAGGGACATGGATGAAGATCCG |
| | | | | | | 3852 | |
| | | | | | 1445 | 11372 | TAGGGAGGGCTTCTCACTTGGCTGTTACCTGGAAGTCCACAGTGGCCCCG |
| | | | | | | 7612 | |
| | | | | | 1446 | 13056 | CGGGGAACTCCAGAATTCGAATACCCCAGCCTTCTGTAGTTCTGGCCCCG |
| | | | | | | 6157 | |
| | | | | | 1447 | 24025 | CGGTGAAATGACTTGGACATACTTGTTGGTTTTCTGTGTTCTTACAAGAT |
| | | | | | | 7185 | |
| | | | | | 1448 | 55031 | ACCCTAAACCCTAAAAACCTCTGTACCTCCTGATATGGGTTGAATATTCG |
| | | | | | | 733 | |
| | | | | | 1449 | 15928 | TTGTACCTGCTGACTCTCTCTGGCAATGTGATTATCATGACCATTATTCG |
| | | | | | | 4298 | |
| | | | | | 1450 | 22424 | CGTGACAGGCCGAAGAAGTCAGGCTACAAACCGGATGACAACCGTAAGGA |
| | | | | | | 68 | |
| | | | | | 1451 | 60973 | CGCGGACCCCACCGCCTCTTCTGCGCGCTAAGGGTGAGCGCCAAGCAATT |
| | | | | | | 823 | |
| | | | | | 1452 | 24361 | TCACCATGGCCCAGAAGTAGGTGGCCATCTCGTGGCGGTTCTGCAGCACG |
| | | | | | | 81 | |
| | | | | | 1453 | 72301 | ATTTTAGTCCAACGGCCTGAGGAAACAGATACCCCTTGATCTGGAAAACG |
| | | | | | | 257 | |
| | | | | | 1454 | 10061 | CGGCTACCTCTACCACACAGTTGGGAAGCGCAGTCCTAAAGGAGACGCAG |
| | | | | | | 4879 | |
| | | | | | 1455 | 13425 | TTGCGGAAGGGCAGTGGCCAACTCTGCTTCCTTCTGGCTTCAGGCAATCG |
| | | | | | | 5144 | |
| | | | | | 1456 | 26835 | CGGCGCCTCACTCACTCCCAGAGCCAGAAACCTGTTCTCCCGGGAATGCC |
| | | | | | | 115 | |
| | | | | | 1457 | 17330 | TTCCAGGATTCAAGACGCTTCCTTTTCTCTTTTTTTGCTTTAAGCATCCG |
| | | | | | | 2602 | |
| | | | | | 1458 | 86088 | GGATGGCCGTCAGGGAATTAAATATGAATCTTTTGTCCTGTCCCACCACG |
| | | | | | | 946 | |
| | | | | | 1459 | 31739 | CGCGAGGGGGAGCAGTGCTCCCAACCCGCGACCCTCCGCCTCAGACATCA |
| | | | | | | 207 | |
| | | | | | 1460 | 24803 | CGGGTGAGAAAAGCTCAGGTGGGGCCCGCCGGGCCGAAGGAGGTAACCCG |
| | | | | | | 903 | |
| | | | | | 1461 | 11708 | CAAACAGAGGCAGGCTGCTTCCTGAGGAACCAGCCCCTCGGGGCTTGACG |
| | | | | | | 6931 | |
| | | | | | 1462 | 60921 | CGGACAAAGTGCAGCGACCACGGCCCCTCAGGTCCCGCCGCCTCCTCGAG |
| | | | | | | 891 | |
| | | | | | 1463 | 89188 | CGGCCACGACTCCAGTTACTATGATGACAGGTCAGACCATGAGCGAGAGA |
| | | | | | | 6 | |
| | | | | | 1464 | 11952 | CTCCAGGATGTAATTAGAGCTAAGAACAGCCGCCATCCCTCAGGGTTCCG |
| | | | | | | 2386 | |
| | | | | | 1465 | 13662 | CGGGCGGGACGCTCCTCTGGCGCTGTAGTGCTCCCAACTACCCTGCAGTT |
| | | | | | | 8604 | |
| | | | | | 1466 | 50513 | GCGGGTGTCCGTAACAGAGGGCGGGCAGAGTCGGGGGTGCGGGGCCTGCG |
| | | | | | | 870 | |
| | | | | | 1467 | 96623 | CGCGGTCTCTTGAGAGCCCTGCAGAGCCCCAGGCACTTTCCGCGGGACCA |
| | | | | | | 674 | |
| | | | | | 1468 | 85672 | TTGGCCGGGCGAGCAAGGCTGCTGCTGCCAGCTGATCTGCTCGGGATCCG |
| | | | | | | 285 | |
| | | | | | 1469 | 31739 | TCTGAGGCGGAGGGTCGCGGGTTGGGAGCACTGCTCCCCCTCGCGGAGCG |
| | | | | | | 202 | |
| | | | | | 1470 | 47483 | TGGCTACTTGTCCTGGCAGGCACTTCTTGATTGGCCGGCGTGCTTGTTCG |
| | | | | | | 268 | |
| | | | | | 1471 | 47483 | GAGGCTCTAAGGGGGCTGCGCAGGGCCCAGACATTGGGGTTATGGCAGCG |
| | | | | | | 418 | |
| | | | | | 1472 | 13545 | TACTGACAACCCGCTAATAGTCTTGGGCTCCAAGAAGCCCGGCAAAACCG |
| | | | | | | 5174 | |
| | | | | | 1473 | 28218 | GGAGACCAGTTCGAGCACTAACGCGGGGGCGCGCGAGTGTGAGGGTTGCG |
| | | | | | | 959 | |
| | | | | | 1474 | 13968 | CCACAGTTGCAGGCTCTGTGGTCAGCTACGGGGTGACGAGAGTGGAGTCG |
| | | | | | | 6745 | |
| | | | | | 1475 | 37390 | ATTGGGGTGCGGGGCGTGCGCGCCGTAGTGCTGTGTGGCGTGGAGCGGCG |
| | | | | | | 284 | |
| | | | | | 1476 | 21736 | CGCGCCCGGCCCCACAAATGTAAGATTTATGCACTTCTCCAAGCCAAGTG |
| | | | | | | 3253 | |
| | | | | | 1477 | 43185 | CGGCCCCATCACTCAATCAGCCGAGCATTCGAAACCAGGTCTGCCAGGCA |
| | | | | | | 803 | |
| | | | | | 1478 | 12644 | CGTGAGCCCTGAGATCCTCAACACCACTGGGACCTACTCCGGAAAGGCTG |
| | | | | | | 8338 | |
| | | | | | 1479 | 14348 | CGGCACGATTCTCTAAGTTCGGAAACCACGAAGCTTGCGCCTTCATGCGT |
| | | | | | | 844 | |
| | | | | | 1480 | 61616 | AGTGAATGGGGAGGCGGGCGGAGTCGGGCCCAGCCAGGCACCACCTAGCG |
| | | | | | | 492 | |
| | | | | | 1481 | 20145 | CGCCGAGTGGGGCGGGGCTTGCTGGAGCCTAAAGTCCAACCCATCCACCC |
| | | | | | | 0743 | |
| | | | | | 1482 | 13546 | AGCGGCGGGGGCGGCTCGCTGGCGCCCTGGAGTCCGTGGATGAGGATGCG |
| | | | | | | 4814 | |
| | | | | | 1483 | 53083 | ACTCCCGAAGCTGAATTGATTTTCAAATCTGGAGGCGTCTCTCGGGGACG |
| | | | | | | 532 | |
| | | | | | 1484 | 13060 | CGCAAGTGGAAAACTATGCGCTGTCCGATCGCAACCCTCCAATCTGTCCC |
| | | | | | | 915 | |
| | | | | | 1485 | 17519 | CTCCAGCTCTGTTGTAATTTTGTCTTCGCCAGATAGATTAGCTGGAACCG |
| | | | | | | 3377 | |
| | | | | | 1486 | 49378 | CGGGAGCAGACTCAGCTGTCCCCAAACCTGAATGCAGGTAACAAGGGCAG |
| | | | | | | 497 | |
| | | | | | 1487 | 15414 | AAGGTCCGGTGGCCGGAGCGTGCGGGAAGCCTGCCCAGAGTCCATTTCCG |
| | | | | | | 4286 | |
| | | | | | 1488 | 13205 | CGCGGCTCATCTGTCATTAGCACCGGCACTAAGCTCCCACCGCTCAGCGA |
| | | | | | | 4555 | |
| | | | | | 1489 | 35078 | GGCTCTGAGGCTGGACCCGGGAACTTCTGTGGCTGGGAGTGTTGCACTCG |
| | | | | | | 9 | |
| | | | | | 1490 | 14079 | GAGAAAAGTCAAGTTGCAGTCCCACACAGAGCCTCTGGGCGCCGCCGTCG |
| | | | | | | 7172 | |
| | | | | | 1491 | 50891 | GAAATCTCACGGTGACCTGGCCTCAAGCGAGAAGGATACCTGGGCCACCG |
| | | | | | | 341 | |
| | | | | | 1492 | 17974 | CGCGAGAGATGGAGCTGCCCACGGTGTTGGTGACGCCCACGGTGAGAGCG |
| | | | | | | 0914 | |
| | | | | | 1493 | 98221 | CTCCATTCGTAGCTTTAATGCTAAGACGTTCATTAGGCGTTGCTCTCACG |
| | | | | | | 619 | |
| | | | | | 1494 | 97646 | CGCCTCGCCCACTTCCCAGTAGACACAGGGACAGCGGCTTCCACTCCCGG |
| | | | | | | 731 | |
| | | | | | 1495 | 15130 | CGGGGCTCTTCCCAAGCCACAAGTAGACTTGGCAAACTTTTTGTCCTAAA |
| | | | | | | 7730 | |
| | | | | | 1496 | 31739 | CATGAGCTTGGGTCTCTCGGAGGAGCAGGAGACGCGGGCTCGAAGCCGCG |
| | | | | | | 423 | |
| | | | | | 1497 | 10547 | CGGCCAGGTCATAAACCCGTCAGGCCGCCGGGCTCCGGATTTGCAGCCTG |
| | | | | | | 9318 | |
| | | | | | 1498 | 10428 | CGCCGAAAATTTATTGACGCGGCGAGGCCAGGCTAACAACACTGCAATCC |
| | | | | | | 69 | |
| | | | | | 1499 | 23820 | TTTGGAGACTTAACACCGGCCGCGTTGTGTGCGGAGGTGGTGTAGGGCCG |
| | | | | | | 979 | |
| | | | | | 1500 | 61655 | CGCCGGTGTTTGGGAATCCCAGCGGGGTCCCCAGCTTGCCGATCTCCCAG |
| | | | | | | 919 | |
| | | | | | 1501 | 19483 | CGCCTGGGGACACCGCTCAAATCCTAACCCTTGGCCGCCCGTCGGCTCCT |
| | | | | | | 721 | |
| | | | | | 1502 | 14993 | CCCAGGTCGCTGTTTCGCGCTCTGTAGGGGATTGGACCAGGAAAGTAGCG |
| | | | | | | 584 | |
| | | | | | 1503 | 64549 | AGTCGGTGGGCCAGTGCAGTTATCCTAGCAAGAGCGGGCAGAGGATGCCG |
| | | | | | | 818 | |
| | | | | | 1504 | 26273 | GCTTTTACCCAGGTAACTAGTTTACTTGGAGCTGGTGTACTTGGTGACCG |
| | | | | | | 556 | |
| | | | | | 1505 | 10091 | CGAGCGGAGGACGCTGTGTGTGCATAAATTTCAGCAACGCTGAATACAGG |
| | | | | | | 6959 | |
| | | | | | 1506 | 22094 | CGAGTTTCTAAATTGCACAGACTGCTCTGGGCCGGGGCAGACACCGCGGC |
| | | | | | | 226 | |
| | | | | | 1507 | 23412 | CGCTACCGCTACCGCTTCTGCTCTCGGTTATGGCAAAAGAGCCACCATCA |
| | | | | | | 409 | |
| | | | | | 1508 | 13094 | GGCGTCGCGGATGCGCCTCAAATTCAGTGCAAAAACGTGCTGAAGATCCG |
| | | | | | | 77 | |
| | | | | | 1509 | 84820 | GTGGGATGTGTGAGCCGGATGCCCTCTCCTTCCGGTGTGGCGAGGACGCG |
| | | | | | | 99 | |
| | | | | | 1510 | 61149 | CCCCGGGCACAGGAGCCAGCTCGGCTCACGGTGGGGTCTGCTTGGAGGCG |
| | | | | | | 009 | |
| | | | | | 1511 | 10460 | CGACCTTGAAGAAGATACACGGGCTATGACTTCGCTGTTGTCACCGAGCG |
| | | | | | | 9432 | |
| | | | | | 1512 | 18771 | CCAACTGGGGGCGGTAGGGGCGGTAGTTACTCGGAAATCCATGTATTCCG |
| | | | | | | 3711 | |
| | | | | | 1513 | 13991 | CGCAAAACTTGTCGCTGCCCAATAGCACGGCCCAAGCACTCTTGGCCGCC |
| | | | | | | 6869 | |
| | | | | | 1514 | 89952 | CGCTTTCATTTTCAGAGCTGCCTGTGGCCTTACGCAGGTTCAGAAAATCG |
| | | | | | | 135 | |
| | | | | | 1515 | 92947 | CGCGGCTTGGTCTTCACAGGCGCAGATTGGGGGCCTGTTTCATTTTTCGT |
| | | | | | | 961 | |
| | | | | | 1516 | 10426 | CCGCTGGAGAAGCGGGCGCGACAGGGCGATGAGTTAACGCGGAGGGAGC |
| | | | | | | 05 | G |
| | | | | | 1517 | 12605 | CGTGCCTACAAGAATTCAGACGTTAGGGAATTCAAGACCATGCCTTAGAC |
| | | | | | | 8 | |
| | | | | | 1518 | 99276 | CGGCCGAGTCATAGGCCTGATCATATTAACGCCCTAGGTCAGAGGGAGAG |
| | | | | | | 357 | |
| | | | | | 1519 | 11537 | CGCCTTCAGCTCCCACCCGCAGCAGCAACCGCAGCCTGCTTCCGGGGACT |
| | | | | | | 7744 | |
| | | | | | 1520 | 39466 | CGGTTGGTAAACCGCTTAGCTGTGAGCCCGACCCAGGGCCTGATTCGAAA |
| | | | | | | 757 | |
| | | | | | 1521 | 20898 | ATGCTCCTGAGCGGGATGAGGGAATCCCAGGGCACAGAGGTATCTCTGCG |
| | | | | | | 785 | |
| | | | | | 1522 | 43276 | CTGTCCAGGTGTCTTCGTTACACATGTGCCTTCCTAGTCTGGAGTCCACG |
| | | | | | | 781 | |
| | | | | | 1523 | 98356 | TGTCTCCACACACAGCTGGGCTGTGGTAGGGGGTGTCTCAGGCCACACCG |
| | | | | | | 101 | |
| | | | | | 1524 | 13611 | GGCTCCAACACGGAGTGCGCGTGCGCTCAAGGACCAGCTGGCTAGGAGCG |
| | | | | | | 4331 | |
| | | | | | 1525 | 10882 | CGCGGCCAAGGACAAGGCCCCGCCCGGGTCCATAACCATTGTCCCCAGCT |
| | | | | | | 240 | |
| | | | | | 1526 | 90097 | GAATCTGCCCCTTAGCCCGTATTGCAGGGGCGGTGCAGTTGGGGATTCCG |
| | | | | | | 981 | |
| | | | | | 1527 | 62360 | CGCAGGTGGAATGGTCTGCAAACAGATGAATTCAGCCCCTCCAAACCAAG |
| | | | | | | 417 | |
| | | | | | 1528 | 21084 | TGCAAGATGAGTCGATCAGTGACGCGTGGGGTGGCATTGTTCGCTCGACG |
| | | | | | | 420 | |
| | | | | | 1529 | 26271 | CGCGCAACAAAACCATTGGCTGAAGAGTCCAACGATGTGATTGGTGAATT |
| | | | | | | 716 | |
| | | | | | 1530 | 51416 | CGCCGGCTCCGCGGTCTACACCCACCCACTCCTTGGATGATCTCACCCGG |
| | | | | | | 213 | |
| | | | | | 1531 | 29937 | CGCTCAGAATTTGAGTGACAGAACTTGCCACCACACAGTGCACTTAATGA |
| | | | | | | 0 | |
| | | | | | 1532 | 13168 | AATAAGGCCTCGGAACCCACCAGTTCAGCCCTGGGCGGGAGTCGGCAACG |
| | | | | | | 4923 | |
| | | | | | 1533 | 13481 | TATGGGAGGTGGTCTCTGGCAGTACTCTCTGAGTGCTGCCTCCCGAGACG |
| | | | | | | 8 | |
| | | | | | 1534 | 60705 | GGCGTTGATATTTTCTTTTCCACACTTAGTCTTCAAGGAGGCTTGTGGCG |
| | | | | | | 839 | |
| | | | | | 1535 | 77585 | CGGGAGGGGGACGCAGCCTAAAGACCTCGTACTCTTGCTTCTTGTTTCTA |
| | | | | | | 318 | |
| | | | | | 1536 | 13356 | AGTGGCCTGCACAGGGGAACTGGGTAGCGAGAGAGTTCCAGGCAATTCCG |
| | | | | | | 2056 | |
| | | | | | 1537 | 13988 | CGCACAGCGCCACAGGCATTCAGGGTGTTTATTGCGCTTGGGGCCAGGGT |
| | | | | | | 0223 | |
| | | | | | 1538 | 81189 | CCACCGGCGGTCTGAAGATTTGGCAGCCAGCAGTCTCCAGAGGGGGGTCG |
| | | | | | | 706 | |
| | | | | | 1539 | 13358 | GTAATAATAGGTACCCCTTTCCAGAAGAGGGTTCAAGATCTTCCAGAACG |
| | | | | | | 9654 | |
| | | | | | 1540 | 40120 | TGGCACGGGTCATCGTGGACAAGTACCGTGATGGCACCAAGATGGTGTCG |
| | | | | | | 327 | |
| | | | | | 1541 | 33700 | CGCGGGCTTAGCAGACCCGCCCATTGGCTCTTGCATCTCCTGCGTGGGAT |
| | | | | | | 747 | |
| | | | | | 1542 | 23412 | CGGCTAAGTGCCCCTCTCGTATCAGGTGGCCGGACACATGAACGGGAAGG |
| | | | | | | 250 | |
| | | | | | 1543 | 37123 | CGCGGCCTCTAGAATATTGTAGAATCTTCCCAAGAGCCCCCGCGGGAAGG |
| | | | | | | 669 | |
| | | | | | 1544 | 10157 | CGCAGTGCCTCCGCGAAACTGACAACTCCTCCGGGCGGTGACCGGCTCCA |
| | | | | | | 0703 | |
| | | | | | 1545 | 57283 | GCCAGGGCCGGCTGTGGTCAGGCGGGCTATTTTCTGGCAAGTGTGGCGCG |
| | | | | | | 436 | |
| | | | | | 1546 | 23563 | CGCCGCCGCCACCAGCGTTGTGAACCTCTGACCCTCGCGGCTCTGCGTCC |
| | | | | | | 925 | |
| | | | | | 1547 | 79627 | CGACCCGCTAGCCTAGGCCGAGACACAGTCTGTATTCTGAAAGCCGCCAG |
| | | | | | | 216 | |
| | | | | | 1548 | 24203 | CGCGCCGTTGTCTAAAAAAGTCTGAACTCCACCTTAGTGTTAACTAGTCC |
| | | | | | | 1694 | |
| | | | | | 1549 | 17702 | GTCACGGCCGCTGACAAATAGTTCCCTTTGCTTCCTGATTTGGAACTGCG |
| | | | | | | 2285 | |
| | | | | | 1550 | 10834 | CGGATGAAGCCCAAGGAACCACAGGGAGATAATTTGGTTTGGACAGGGCT |
| | | | | | | 29 | |
| | | | | | 1551 | 65594 | CGTTAACACTGAGCCATGAAGCCAGGGCTTGTGTCCTCAGAGAATGCATA |
| | | | | | | 890 | |
| | | | | | 1552 | 52626 | CGCCCCGCCGAAGCCCAGGCTTTCAGTCCAAGCAGGGATGGTCCGGAGTA |
| | | | | | | 889 | |
| | | | | | 1553 | 96674 | TAAATAAATGTCAAACACACACAAAATCCACTCTGAGGCGGGTGCTGACG |
| | | | | | | 333 | |
| | | | | | 1554 | 11207 | CCTTGCTTGCTGGGGACTGGGGCCGCGAGGGCATACCCCCGAGGGGTACG |
| | | | | | | 3373 | |
| | | | | | 1555 | 25034 | GGCCTGTGGGCGCGGCGCAAAGCCCGGACTGGATTCCAGAGGGGCAGGCG |
| | | | | | | 220 | |
| | | | | | 1556 | 26226 | AGAAACCTACAAAAAATTAAATTTGCCCTGTAAAACACTAGTCTGAATCG |
| | | | | | | 964 | |
| | | | | | 1557 | 27258 | AATCTTGGAAAACAGAAACACCCCGAAAAATTGCAAGTTGTTTCCGCTCG |
| | | | | | | 466 | |
| | | | | | 1558 | 22094 | AAACAATGCTTATCTCAAGCTGACTCAAAACTGGCTCTTGAGAAAATCCG |
| | | | | | | 963 | |
| | | | | | 1559 | 14937 | CGCGCACCTCCGCCAGCAGTCCTACGACGTGACCGACGAGCTGCCACTGC |
| | | | | | | 4763 | |
| | | | | | 1560 | 61616 | CGGGAGTTTTCAGTCAAGAAGCGATAATGCGCTTTGGCTATTTGGGGTTT |
| | | | | | | 390 | |
| | | | | | 1561 | 35046 | ATGCACAGCGATGGGGGAATGGACCATCTTGGAGAGGCTGCTAGAAGCCG |
| | | | | | | 650 | |
| | | | | | 1562 | 10090 | TGTCTGGGTTAATGTTTTATAAGGGACTGGCTACTCTCGTCTACCTGCCG |
| | | | | | | 4055 | |
| | | | | | 1563 | 32484 | GCAGCGCGCGGCGCGGAGAGGCGAGGACCGGTATCTGGAGACTGGGGAC |
| | | | | | | 259 | G |
| | | | | | 1564 | 32110 | AGGGGCGCGAAGGCAGGCGCGGCCAGGGAGTGAGCGGGGCGCTGGGCGC |
| | | | | | | 523 | G |
| | | | | | 1565 | 10091 | GATCGCATTCTGGGTGCCTGAGGGCCAGAGGCTAGGTTTTAAGGCCACCG |
| | | | | | | 5395 | |
| | | | | | 1566 | 87138 | CCGGGCAGGAGATCTGGGCTGCGGGCGCCAGGCAGAGCTGGCATCTTCCG |
| | | | | | | 203 | |
| | | | | | 1567 | 61616 | TAATTTGTATGGAACCACGAAAAACCCCAAATAGCCAAAGCGCATTATCG |
| | | | | | | 369 | |
| | | | | | 1568 | 24648 | GGGGCTTGGCACACAGTAGGTCTAAGGCACCGAGGCAGGAGCGTCCCCCG |
| | | | | | | 696 | |
| | | | | | 1569 | 38964 | CGCTGACTGTGAATAAGTGTGTCAGTTCTTAAGGTCCAGCAACACAAAGC |
| | | | | | | 944 | |
| | | | | | 1570 | 11581 | GGTCAGTCCTGTAGTGCGTAACGGAACTCGGTTCCGGCTGGCTCTGATCG |
| | | | | | | 9158 | |
| | | | | | 1571 | 65331 | CGCCCAATGTTTTTGCAAACTCTTGCAGCTGGGGGAAGGCAGTGGATACT |
| | | | | | | 63 | |
| | | | | | 1572 | 19384 | CGGTTGGGTTTATAGAGTTGTGATCACCAAAGCCTGCATTTAAAATAGAC |
| | | | | | | 8133 | |
| | | | | | 1573 | 19577 | AACGGCTTAAGTCAATTATAACCTTCCTTTCAGAACCATCTTGTGGGACG |
| | | | | | | 822 | |
| | | | | | 1574 | 10847 | TGAGGGGACAATAGCTGGTCTTACAAAGGCACCACCTGTGATTTAGCACG |
| | | | | | | 9584 | |
| | | | | | 1575 | 18489 | ATAACCGTCTCTCTCTCAAAACGTTCTTTATTAAAAGGCACTGGCGGCCG |
| | | | | | | 660 | |
| | | | | | 1576 | 13546 | CGCCCCAGCCCAGTGCCCCCCGAAGGGCCAAATGCCAAGTCCACTGAGGC |
| | | | | | | 5030 | |
| | | | | | 1577 | 14492 | GGAGCCGCCCGTTTGCCTGGAGAGCAGCAAGGACAAAGCAATGGGCTCCG |
| | | | | | | 02 | |
| | | | | | 1578 | 91192 | CCATGCCATGAGAGAGAACCTGGCAGTGTCAGATTCACTCCAGCGGGTCG |
| | | | | | | 798 | |
| | | | | | 1579 | 17703 | CTCAGAGAATACCTTCCTTCCGGCAGGAGACCGTTTGGCCCTGTATTCCG |
| | | | | | | 0228 | |
| | | | | | 1580 | 15112 | CGAGACTAAGAAGTGACCCAACCTAGGTGACCCTTCAGCTAGGTCACTCT |
| | | | | | | 9081 | |
| | | | | | 1581 | 26273 | CGGTTTCTCATTGGTTCTTTTAGTGTCTGAATATATGATAGGCCATTTCT |
| | | | | | | 096 | |
| | | | | | 1582 | 98982 | GTCCCTTCCCTGGCTCAGGGCTGGCTGGAAAGACAGAGACGTTTCATGCG |
| | | | | | | 28 | |
| | | | | | 1583 | 34392 | CGCGGTCCTGGCGCCCCCACACCCGCGACCCCGCGAGGCCCCCACCTCCT |
| | | | | | | 7 | |
| | | | | | 1584 | 10089 | AGATTCGCTTTTCTAACTACGGAAGTAAGGCTCTGGGCAGCTGAGCTCCG |
| | | | | | | 5618 | |
| | | | | | 1585 | 38080 | CGCTGGAGACAAGCCCCAGCAGAGCGAAATATCCTGAAGTAGCTTTCTTT |
| | | | | | | 303 | |
| | | | | | 1586 | 32096 | CTAGGGCAGCCTCAGTTGGCAGCCCAGAGCTGTGACCGGGTGTTGGAGCG |
| | | | | | | 716 | |
| | | | | | 1587 | 18771 | CGCCCTTGACTGAGGAGTGTTTTTAATAATCATCTGGCCGACTTGGAAGC |
| | | | | | | 4068 | |
| | | | | | 1588 | 10642 | CGCTCCCACCGCTACGCGGGGCCGCCTGGCTCCTGGTTCTCATCGTTCTT |
| | | | | | | 9316 | |
| | | | | | 1589 | 26251 | TGTATTCTTACTCCTTTATCTTGTTGCAATGCCTGATCCAGCTAAGTCCG |
| | | | | | | 899 | |
| | | | | | 1590 | 16369 | CGCGCGAGCCGCTCTTTGTGGCAGAGCATCCTCTTTTGAAACCAGAATTC |
| | | | | | | 5111 | |
| | | | | | 1591 | 26250 | AACTGTTTGTTCAGTTGTGACCATTGCTTGAAACCCATTCCTATGGCACG |
| | | | | | | 826 | |
| | | | | | 1592 | 18891 | GGGTTTGCGTGCGGGCCGGGTGCCTGGGGGCCCCGGGCTGAGGGTGAGCG |
| | | | | | | 6724 | |
| | | | | | 1593 | 74928 | TTGGAGATCTCGGAGTTGTGCATCTTGGGGTTCTGCTGCGCCATCTGGCG |
| | | | | | | 01 | |
| | | | | | 1594 | 13611 | CGCTGCAAATAACCCCCACCACAAGCACTGCCGGGAGCCCAGAATAGCCT |
| | | | | | | 370 | |
| | | | | | 1595 | 40120 | CGGCCATTTCAAAGAGCTGCTCCAGCCGTTCCCGTTCGTGGTTGGTGTCA |
| | | | | | | 496 | |
| | | | | | 1596 | 81897 | TCACCACACAATTGGGCTTTTTACCTCTCTTTAAACAGAATGAAATGCCG |
| | | | | | | 627 | |
| | | | | | 1597 | 13611 | CGGATGCCCCCAGGCTGTGTGAAGAAAATTCAGGGCAGGCTGCGAGTCTG |
| | | | | | | 481 | |
| | | | | | 1598 | 57037 | TTAATAACATACCAATTTTGCCACCCTTGGCATAGGGAGCTAGCAGATCG |
| | | | | | | 657 | |
| | | | | | 1599 | 44185 | CGGGCGACCGCAAGCAGATCTACAACATCCTGAGCACGCTGGGGCTGCGA |
| | | | | | | 323 | |
| | | | | | 1600 | 86383 | CGGTGCTCAGTGTTGCCTTGTGCTGTCCAATATAATAGCCATTCGCCACG |
| | | | | | | 761 | |
| | | | | | 1601 | 12721 | CGGGCTCCAGGACCGTCCCCTGTGCGCCCTCATCTGCACCGTCGCCGTCC |
| | | | | | | 1262 | |
| | | | | | 1602 | 60985 | GAAGTCGTCGCCGGCCTGGCGGAGGGTCAGGTGGACCACAGGTGGCACCG |
| | | | | | | 636 | |
| | | | | | 1603 | 21023 | TCTTGGAGGGTGTCGGGGTTTTCCTTTCTTTTTCATTTGAATTTTATCCG |
| | | | | | | 042 | |
| | | | | | 1604 | 32223 | AGCCCTGGAGGAATTTCCCTTTTGAAATCTTGCGGTGTTGAGTAGGACCG |
| | | | | | | 098 | |
| | | | | | 1605 | 62583 | CGGCGTTCCAGCTCTCAACCTTGCTCCCAGCAGCCCCCGCCGGCGCACTC |
| | | | | | | 919 | |
| | | | | | 1606 | 10843 | TCTAATGAGAGATGACGGCCAGGTGTTCTCAGCAGCCCCTGGCCCTCACG |
| | | | | | | 6768 | |
| | | | | | 1607 | 95240 | CGGAGATGTCCTCCAGAAAGCAGCAGAGCCATGGAACGGGGTTTGAGCAC |
| | | | | | | 444 | |
| | | | | | 1608 | 10506 | TGGAGTTTGGTGCGGTCCCGGTGCCCAGGGGGCGCCTTTTCCGCATGCCG |
| | | | | | | 7038 | |
| | | | | | 1609 | 99178 | GCATTACAGGGTTCCTGGTGTGTTCCTCTAACCACTTAGTTGGGAAATCG |
| | | | | | | 39 | |
| | | | | | 1610 | 63614 | CGCGAATGGCGGTTACAAGTGCAGCTAGTATAAAAAGCTGAGATAAGGGT |
| | | | | | | 857 | |
| | | | | | 1611 | 20212 | TAAATGCTTTCCAATAAAGCATGTCCAGCGCTCGGGCTTTAGTTTGCACG |
| | | | | | | 2669 | |
| | | | | | 1612 | 99986 | CGGGTCACTCAACTAAGAGTAGCGTCCAAAGGCAGGATGCGGTAACACCT |
| | | | | | | 964 | |
| | | | | | 1613 | 10531 | TCAGAGGAGTATCAGAGCCAGCGCTGTGTGTGCAGGGCTGGGCCTTTCCG |
| | | | | | | 9819 | |
| | | | | | 1614 | 85673 | CGGCCTCGTAAAGCTCCCAGCTGGCCCGGACCCCGAGCTCCTCCCGGTTA |
| | | | | | | 270 | |
| | | | | | 1615 | 22040 | AAATCTAAGTAAGCTGGTCCACTGATGAAAAACCTCCTTCCTTGCATGCG |
| | | | | | | 307 | |
| | | | | | 1616 | 32322 | CGCCGCGGAACTCACAGAGGTTCCCCCGCCATAGCCTCCCGCGTGCGCTC |
| | | | | | | 46 | |
| | | | | | 1617 | 73976 | TCCAGTCCCGAGCATTTCGGATGAATGAATGATGAACAAACGACAGAACG |
| | | | | | | 790 | |
| | | | | | 1618 | 41363 | CGCAGCAGCCTGAGACGCTGCCAGCTCTTCAAACGTTACCCGAGGGCCCG |
| | | | | | | 789 | |
| | | | | | 1619 | 11219 | CTGTCGGGTGCAGGTGGACGTCCCCTCACGGTAAGGTCAGAGTGCTCCCG |
| | | | | | | 29 | |
| | | | | | 1620 | 63005 | GCTTGCGAAGTCCGGCTTCTCTGAGGCCCCGTAGCTGGCGCGAGTTGTCG |
| | | | | | | 077 | |
| | | | | | 1621 | 14937 | GGGCAGTGGCAGCTCGTCGGTCACGTCGTAGGACTGCTGGCGGAGGTGCG |
| | | | | | | 4761 | |
| | | | | | 1622 | 22317 | CGCCCTGCGGGGAGTCGCCTTCGTTTAGTCCCAGGTTTCTCCGGCGCTTT |
| | | | | | | 6606 | |
| | | | | | 1623 | 38821 | GGAGCCTCGCAGAGTTTTAAAGATGCAGAGCTCCTTTTTCGGAGGCCACG |
| | | | | | | 487 | |
| | | | | | 1624 | 62305 | AAGTGCTGATAGTGGGCCTCACAGAAAAGTTACCATGAACCGACTTTCCG |
| | | | | | | 003 | |
| | | | | | 1625 | 13974 | GAGAGAACGGAGGTGCGGATGCGGCGCAAGCAGAGGCGCAGGCGAAGGC |
| | | | | | | 467 | G |
| | | | | | 1626 | 10280 | AAGTCCTTCATCACCAGGAGTGTCTGCTTAAGTCTATTCCAAGTTGAACG |
| | | | | | | 3290 | |
| | | | | | 1627 | 26252 | CGAGGGCACTAAGGCCGTCACCAAGTACACCAGCTCCAAATAAATGGACG |
| | | | | | | 265 | |
| | | | | | 1628 | 53446 | CGTGAAGTGGGTGCTTCAGCTGTCCCCCAGCTTTAGGATTTTAACCCAGC |
| | | | | | | 784 | |
| | | | | | 1629 | 18005 | CGCGGAGTGGACGCAGCCACGTCTGCAACTCACCCGGACACACACAAAAA |
| | | | | | | 42 | |
| | | | | | 1630 | 69451 | ATGCGCTCCGGAACCGTAATGCGCGCTTTTTCTAAGCCTTACGGTAAACG |
| | | | | | | 412 | |
| | | | | | 1631 | 52858 | GCACATGCGGATGCGGAGAGAGGCCCATGGCGAGTTCGGCGGCGTGGCCG |
| | | | | | | 0 | |
| | | | | | 1632 | 21635 | CGGGGCCTCCCAGGCCACTCCTTCTAGGACAAGTAGGGTCTGGGCACTGT |
| | | | | | | 29 | |
| | | | | | 1633 | 56932 | GCGAACCAGGTTGGGCGGGGCCTGGGCGGGGCTCTCAGATAGCGAAGGCG |
| | | | | | | 872 | |
| | | | | | 1634 | 77184 | CTGTCCAAGCCTGGAAGGGGTCATTTATTCCATGCAGAAGGAACTGGGCG |
| | | | | | | 194 | |
| | | | | | 1635 | 15503 | CGCCTCAGACGAGGGCGGGCTGTGTGGGGCGGGAGTACCAGAAAGGGTCG |
| | | | | | | 5375 | |
| | | | | | 1636 | 76923 | CGGGACCTCCCAAGTAAGGGACAAACGCGCTTCTCCAGAAGAGGCGTGTC |
| | | | | | | 943 | |
| | | | | | 1637 | 37571 | CGCGCAGGCTGCAGCCCTCCTACCCCGGACCTTCGCAAACCCCGGGGCTG |
| | | | | | | 729 | |
| | | | | | 1638 | 36604 | CGCATGGAATCTGGTGTTTATTACACTCGGGGGAGAGAGGAGGTCACTCG |
| | | | | | | 614 | |
| | | | | | 1639 | 39466 | GCAGCGGCGGGCTAAGCTTCCCTTTCCCACTTTGTTCTGGGAGGCAGTCG |
| | | | | | | 295 | |
| | | | | | 1640 | 10291 | AGCTGGGGGCTCTGCGAGGGGGCGGGGCTCAGACACGGGTGGGGTCACCG |
| | | | | | | 88 | |
| | | | | | 1641 | 51231 | CGCAGTAACCGGATGACTCCTACGGGTCACCTCGCAAGCCCCGCCCCCTC |
| | | | | | | 736 | |
| | | | | | 1642 | 35479 | CGCGAGGCAGCGCCTCTACCCGCTACCCCCAAGCCTGGGCGCACCCCCTC |
| | | | | | | 628 | |
| | | | | | 1643 | 44923 | CGAACCTCAGTTGAGAAACAACAGAAGCTGAGACAATTTTACGCAGGTGA |
| | | | | | | 719 | |
| | | | | | 1644 | 41797 | CGCCAGCATCCGTCAGGAGGATGCCTTTGATAACAAAATTGACATTGCTG |
| | | | | | | 729 | |
| | | | | | 1645 | 11513 | AACTGGAAGCTATGTCGCCCCTTCTTTCAGGGCCCAATTAATTCGCCGCG |
| | | | | | | 6096 | |
| | | | | | 1646 | 80976 | CTGCGCCGCGTCCATGTAGGAGTGGCTGAGGCCCGGGTGGTGCGTGTCCG |
| | | | | | | 89 | |
| | | | | | 1647 | 84821 | CGCCACACCGGAAGGAGAGGGCATCCGGCTCACACATCCCACCCTATGTC |
| | | | | | | 07 | |
| | | | | | 1648 | 35298 | GGCCTGGGTGCCCAAAGTGGCAGTGTGGGCCTCTGTGGGATGGAGAGGCG |
| | | | | | | 199 | |
| | | | | | 1649 | 10914 | ACTGCTTTTCTGTAAATGACAGAAATACTAAGAGAACTTGACGGAAATCG |
| | | | | | | 9011 | |
| | | | | | 1650 | 16225 | GTCTGCATGTGTCTCCTTAGCCTTAACCCCCTTGCCTAGGACAGAAAGCG |
| | | | | | | 9067 | |
| | | | | | 1651 | 62620 | CTGAACCACCAGTGATGAATTGCTGCTCACCAGTGATGAGTTGAATACCG |
| | | | | | | 843 | |
| | | | | | 1652 | 78172 | GCACGTCGGGAACCCGCGAGTTAATAGAGGTGACCGAGGACGTGGACCCG |
| | | | | | | 337 | |
| | | | | | 1653 | 29186 | GCTGACTTGATGCGGCCAGGTTTCTGGGACCAGGAGGTTGGGACACGACG |
| | | | | | | 231 | |
| | | | | | 1654 | 27282 | CGGACACCGAGTCGGATTTCTATGAAGAAATCGAGGTGAGCTGCACCCCG |
| | | | | | | 987 | |
| | | | | | 1655 | 12898 | AGCAGCAGCGTGGCCAGCACGTAGCCCAGCTGCTGGAAGAAGTGGGCTCG |
| | | | | | | 35 | |
| | | | | | 1656 | 26250 | AGCTTGCGAATCAGTAGCTCAGTCGATTTCTGATAGCGGCGGATTTCACG |
| | | | | | | 685 | |
| | | | | | 1657 | 10421 | CGGGCCTCTAAAACATGAGCTCTGCCTTCTGGGATCAGTGCACATAGACC |
| | | | | | | 6442 | |
| | | | | | 1658 | 66275 | GCGGGCTGGCCTTTCTGCTGCTGGTAGGAGGATCATGTGCTGCTATTTCG |
| | | | | | | 988 | |
| | | | | | 1659 | 32016 | CGCTTGTTTTAGAATCTGTGCCCTGCATTGCTGTAAGCAGCTCACAAACA |
| | | | | | | 535 | |
| | | | | | 1660 | 10799 | CGGGCAGAGGAACAGGAGGAGAAACTGCCGACAATCCCTCATTTCCAATG |
| | | | | | | 5 | |
| | | | | | 1661 | 75316 | CGCCGCTGCTAAATATATCCGTAGGAATGGAGAGGGACCGGATCTCAGGT |
| | | | | | | 383 | |
| | | | | | 1662 | 50683 | GGGTGCATTCCATACTGAGAGCCATGGCTCATGAGGGACAGGTCATGGCG |
| | | | | | | 213 | |
| | | | | | 1663 | 17275 | CGGATTATTGCCTCTAAAAGGCTGGCCTGGCACCCTGCCTGGCAGCATCT |
| | | | | | | 1061 | |
| | | | | | 1664 | 25149 | CGTGACGTCCCGCAGAGGCCTCGGAATTACTCAGCATTCACATGCCGTTT |
| | | | | | | 977 | |
| | | | | | 1665 | 33903 | CGCCCAGCCCCATGGTCCTGGAGAGTCCCCCGCTCCAGCCCTGGACCCTC |
| | | | | | | 32 | |
| | | | | | 1666 | 91580 | TCTGTCACCCAGGCATCAGGATTTTTCAAAATTACCCCTCTGTTGAGCCG |
| | | | | | | 280 | |
| | | | | | 1667 | 37608 | CGGCCATGACTAGATTTTCAAAGGCTATTGGTATCAGGAGTGTCTTATGA |
| | | | | | | 096 | |
| | | | | | 1668 | 29967 | CGCTGCGTGGGAGTTCCCATCCCGCGGTCCCAGGACCCCCGGCAGCAGCT |
| | | | | | | 531 | |
| | | | | | 1669 | 11104 | GGAGCTCTGACCTGCCCTGGCTTGGCTGTGCCTGGGTTTGGGACAGTTCG |
| | | | | | | 0242 | |
| | | | | | 1670 | 11062 | AATTCACCTGAGGCACTTGTTAAACCCAACTTTCCCAGGCTCCTCGTTCG |
| | | | | | | 7980 | |
| | | | | | 1671 | 31214 | CTGGGCTGGCTCTCACTGGGTTTATTGGAGCACCTAGGCTTAGAACCTCG |
| | | | | | | 401 | |
| | | | | | 1672 | 50265 | CCATTTGCTTATTCTCACTATTGTTTTAATTTATTGTGCAGCCTGTTGCG |
| | | | | | | 600 | |
| | | | | | 1673 | 10220 | TTGCTGAACCCTGCGGGGGGCCCGGCTGAGTTTGTTCATTTATGGAAACG |
| | | | | | | 802 | |
| | | | | | 1674 | 11931 | TGTAACTGCGCATTTTTCTAGACCAGTCTTTATTATTCCAGCAATCAGCG |
| | | | | | | 2767 | |
| | | | | | 1675 | 14714 | GAAACTGCAGCGTTTCGGCCTCACAGATGGGGCTGGAGTTGGAGACGTCG |
| | | | | | | 0880 | |
| | | | | | 1676 | 11495 | GAAGGTCCTCTGCACCAGAAAGGCTGCCCATGGCACAAACCCTGATCTCG |
| | | | | | | 7471 | |
| | | | | | 1677 | 89520 | CGCAGACCACAGAATCCAAGAGTGCTAGGAATCAGAGGAGAGAGAGGAA |
| | | | | | | 29 | G |
| | | | | | 1678 | 14042 | CGCATTTTGTCGGAATAAACCAACACACGGAGGTTGGGTAATCTAGCCCC |
| | | | | | | 0518 | |
| | | | | | 1679 | 12987 | AGCAAAGTTCCTTTCTAAATACCCCATATTGAATAAACACTGTTTAAACG |
| | | | | | | 1059 | |
| | | | | | 1680 | 13494 | ATCTCCAATGCAAACCCAGTGTGTGGGTGGCTGGAAAACACACTACTACG |
| | | | | | | 4446 | |
| | | | | | 1681 | 32173 | GGTTTCACATTCCATTGAAGTCCCACTGGCAGATGCCTTTGGTAAGCTCG |
| | | | | | | 227 | |
| | | | | | 1682 | 12130 | AAAAAGGTTTACATGACCACTAACGCTAACGGAGCACTTAGTACTTGCCG |
| | | | | | | 0857 | |
| | | | | | 1683 | 27015 | AACAGAGCCAGCATCTTGCCAGGGCCCCGGAGGAGGGGTTCCCCGCTACG |
| | | | | | | 813 | |
| | | | | | 1684 | 11637 | TTTTCAGCAGAACAGACGCAGCCCCCGAGTCAGTGCCGTCAGAAGACACG |
| | | | | | | 1187 | |
| | | | | | 1685 | 11270 | TATGTTGCTGGTGCGGCGGCTCCGCGGCGTTGCTGGCGGCGGGGGGAGCG |
| | | | | | | 9411 | |
| | | | | | 1686 | 17363 | CGCCACCCAGAGACTGAAATTATAGATAATTCCTGGCTGTTTTCCACTCT |
| | | | | | | 9130 | |
| | | | | | 1687 | 16877 | TATTGATAAGGACATTTCATACCTAACAAGGGCCAGGTGACATTTCCTCG |
| | | | | | | 3765 | |
| | | | | | 1688 | 15583 | TGACCAGAACTGCTTTTATTGACACCCCCTTTCCTAAACATAGCTTTTCG |
| | | | | | | 1789 | |
| | | | | | 1689 | 20359 | CGCCCCGCCAGCCTCTCCGCCGCTGGGCTCCACCCTCCCGGGCTCTGCTG |
| | | | | | | 8761 | |
| | | | | | 1690 | 43865 | TATCGACGGGTAAAAAGTGTTGTCCTTTAAAAAGTGCCCCACTAACTTCG |
| | | | | | | 055 | |
| | | | | | 1691 | 87229 | CGCGCTGGAGGTGAGACTAACCTCTAGTCCCCCGTCGAAGCCAGAGAGCA |
| | | | | | | 552 | |
| | | | | | 1692 | 77734 | CCTGCCACATGCAGATCACTTGGGCCAGCGGAAGTGCCCCTGGCTGCCCG |
| | | | | | | 334 | |
| | | | | | 1693 | 48918 | CCCTTGCAGCAGCGCTTTTCCGGGCGGGGGGCATCCGGTGGAGGGCTGCG |
| | | | | | | 116 | |
| | | | | | 1694 | 37321 | GCTGGGTGGGAAGCAGACGCGGTACGGTGGGCAGAGGTCCCCAGCCTGCG |
| | | | | | | 490 | |
| | | | | | 1695 | 50694 | CGCCTTGTTTGGATTAGCCCTCCAGATCTGCCAACCTGATCAACTCCTGA |
| | | | | | | 985 | |
| | | | | | 1696 | 10352 | CGCGCCCCAGAAGCTCTCAGATACCCCCACGATTTCGGTGACCTTCCGCA |
| | | | | | | 4899 | |
| | | | | | 1697 | 26223 | GGGCGGGAAGCCGGGCGCCTCCTTATTTCTTTACGGGGGCGCTGGCTACG |
| | | | | | | 206 | |
| | | | | | 1698 | 72668 | CGCCCACTGGCTTGCTGGTTAGGCTGTGATCGCGATCGCTTTGACTTCTC |
| | | | | | | 487 | |
| | | | | | 1699 | 79919 | TGGCCGCGGTGAGAGCGGGGCCCCAGGGCTGCGCGAGGTGGGGCGATGCG |
| | | | | | | 578 | |
| | | | | | 1700 | 43741 | GGATCGAGGCCCAGAAAACGGAGCAGCGGGCACCAGGGAGGCCTGGAAC |
| | | | | | | 557 | G |
| | | | | | 1701 | 10456 | GGCTTCACCCTTGAGACTGTGTTGCCCATTGCTCGGCCATCGGTCTCTCG |
| | | | | | | 9653 | |
| | | | | | 1702 | 51522 | GGGAGATTCGGGCTGGAACAGCGGTAATGGGCACAATTACCCTAATGACG |
| | | | | | | 588 | |
| | | | | | 1703 | 63025 | TTTCTCAGCCTGGCTTTTATTTACACTCTTATTAAGGAGGCTTTCATTCG |
| | | | | | | 948 | |
| | | | | | 1704 | 61835 | GTGGCAGTGCCACCTGGGCCCGGACTCTGGGACTGCGGGAGGCGGGAGCG |
| | | | | | | 708 | |
| | | | | | 1705 | 21666 | AGTTCCCCCTTTTGTTCCAAGTCCCGGAGCAGACAAAGAGGCGGCGAGCG |
| | | | | | | 659 | |
| | | | | | 1706 | 12419 | CGAAGTCAGGGAATAAGAAATCTCCAGTTCAGATCTCACAGCTTTGAAAG |
| | | | | | | 0997 | |
| | | | | | 1707 | 51139 | CGCCAGGCTCCTGACCCCAGCTTGGACAGCAGGCCGCCGAGCGCCCCTGA |
| | | | | | | 025 | |
| | | | | | 1708 | 26506 | CGCTCCCGCCTACCCGCAGCCAGGAAACCCCGACTCCGCTGACTGGGATG |
| | | | | | | 713 | |
| | | | | | 1709 | 99594 | CTTGGTGGAGCGAAGTTGCTCTCCCGGGCTTACCTGAACTGCCTGCGCCG |
| | | | | | | 931 | |
| | | | | | 1710 | 31938 | CGGTGTCTCCACTTCACTCAGGTATAGTGTTCCCTGGAACCGGGAGGCTG |
| | | | | | | 777 | |
| | | | | | 1711 | 10256 | CGAGCCTTCCGCGGCTTGGTTGGGGCTTCTCGGTCTTAACGTGGTTACCG |
| | | | | | | 9894 | |
| | | | | | 1712 | 23309 | AAATCCTGACATAGATTTCAACACACCTTATGATTACCAGAGCACAGACG |
| | | | | | | 774 | |
| | | | | | 1713 | 50260 | ATGCCATAAAACAACAAGCCGGTCCCTGGGAGCAAGTAAAAATTTATTCG |
| | | | | | | 129 | |
| | | | | | 1714 | 46916 | ACACCACGTTTCCAGCTTGGAGTGGGCCTTGAGCCTTGGGACTGACCTCG |
| | | | | | | 520 | |
| | | | | | 1715 | 13922 | CGGGTGCCGCAGTAACGGCTGCTGCTCGGCCAGGCGGTAACTGATGGGCG |
| | | | | | | 8150 | |
| | | | | | 1716 | 15780 | ATCCTGAGATGAGGTGGGTTGGCGACTAAGGCGCACCGGTGGGCACTGCG |
| | | | | | | 306 | |
| | | | | | 1717 | 39377 | CCTGGGCAGTGAGCCTGTTTATAGACACCCTTCTCCCTTCCTTGGTGTCG |
| | | | | | | 790 | |
| | | | | | 1718 | 15385 | CGGGGGGTTTCCAGCCCGCCTCGGGCAGGAAACCAGGACCTCCCTGCACC |
| | | | | | | 9646 | |
| | | | | | 1719 | 59990 | CGCCACCTGACCGGGCCTGGCGCCCCCAATGTGGTGCAGTGGCCCAGCAA |
| | | | | | | 794 | |
| | | | | | 1720 | 78982 | TGCCCCCTAAACTGTTGCAAGTCATAGCCCAAACTCTGTAAGCTAAATCG |
| | | | | | | 418 | |
| | | | | | 1721 | 81106 | GTCCCCTTGCGAGGGCACTAGGACAACAGGAGGGGCGCACCTGCAATACG |
| | | | | | | 857 | |
| | | | | | 1722 | 13414 | CGCCCTTTCTGCCGACCTCACGGGCTATTTAAAGGTACGCGCCGCGGCCA |
| | | | | | | 3906 | |
| | | | | | 1723 | 38624 | CGCCCCGCCCTCGCCACCCAGCCTCCCTGGCGGCCTCAGGTCGCGCCTGC |
| | | | | | | 28 | |
| | | | | | 1724 | 41174 | ACATGATGCCCTAGTGCAGCTGCTATGTGCATTTGCCAGACATTTCCACG |
| | | | | | | 793 | |
| | | | | | 1725 | 13060 | TCTGTCCAGGATACAGCCTGCAGCCAGGATCGTCCCTCTCAGAGTCCTCG |
| | | | | | | 741 | |
| | | | | | 1726 | 76227 | CGAGGCCAGTGCGCGGGCAGGAGCGGGGACGTGCTCAGAAGAGCCGGGC |
| | | | | | | 996 | G |
| | | | | | 1727 | 28544 | TTTGACAGCGCTGCCAGATTCGGGAATGAGGATCACTGCGGCGAGGCCCG |
| | | | | | | 760 | |
| | | | | | 1728 | 79495 | GCCGGCTCACGCTCAGCAGGTGGGCCTGCGGGTGGATGGCCAGGTGCACG |
| | | | | | | 953 | |
| | | | | | 1729 | 24803 | CGGCCCGGCGGGCCCCACCTGAGCTTTTCTCACCCGCTCAAAGCCGCTAC |
| | | | | | | 917 | |
| | | | | | 1730 | 12409 | CGGAGTGACGTGAGGTGAGATTTACAGGCTGTTCAGTACATATCACAAGT |
| | | | | | | 2424 | |
| | | | | | 1731 | 41881 | CGTCTTCACTCAGGGCTTTGGGGATCCCCTCGTCGCCCCAGGTCAGTGGG |
| | | | | | | 829 | |
| | | | | | 1732 | 14042 | CGGCCAATACCTCGGCTTGCACAAAGCTGCCTGTCAGCTTTCCTAAGACA |
| | | | | | | 0475 | |
| | | | | | 1733 | 14572 | CGGGAGTTTGTAGTATTCATAACCGTTGAGGACTCTCTGACCCCAGCTCG |
| | | | | | | 0805 | |
| | | | | | 1734 | 79448 | CGGGCCTATCATTGGCTTAGGTTTTAGGAAGGTCCCAAGCTCATTTGCCA |
| | | | | | | 940 | |
| | | | | | 1735 | 28501 | GCGAGCGCAGATTTGCCCCACCCCAGAGCCCAGGCGGGTGTGGAGAACCG |
| | | | | | | 366 | |
| | | | | | 1736 | 21984 | CAATCGTCTGGCAGAGTTGGCCAGCAGAGATCAGCCGGCGTGAGTCAGCG |
| | | | | | | 8528 | |
| | | | | | 1737 | 12589 | CGGGTCTGCACCAACCTCAGTTTCGGGGCTGCGGCTCACAGAAGTCTAAC |
| | | | | | | 9401 | |
| | | | | | 1738 | 44422 | CGGGGAACATCAGCACCCACGGAGACACCTGCGCCAGGGAGACACCTCTG |
| | | | | | | 8 | |
| | | | | | 1739 | 53359 | CAAGCCGAAAACCAGGAGACTCTTGCAGTCAGGGGGCAACTGGGGAAGCG |
| | | | | | | 506 | |
| | | | | | 1740 | 49576 | TGAGGCCTGACGTCCAGCAACAGGTGGAATGCCCCAGAATCCAGCAGTCG |
| | | | | | | 406 | |
| | | | | | 1741 | 15267 | GACAGGTCCTGGTTGCAAGTTTCTCCATAAGGGTTGCTCTGTGATGTTCG |
| | | | | | | 1707 | |
| | | | | | 1742 | 56562 | GACCTAGATGTGAGCCACACCTTCACAAGCCATGCCATGTTCAGAGAGCG |
| | | | | | | 731 | |
| | | | | | 1743 | 75315 | CGGGACAGGGAAAATGAAAGACTTTGGAAGTCGTCAGGAATTTGACTCTG |
| | | | | | | 837 | |
| | | | | | 1744 | 10862 | CGCTCCAATTTGAGATCCCAAAATGAGATGCTGCCCGGGACCAGAAGTCA |
| | | | | | | 20 | |
| | | | | | 1745 | 29847 | CGCCACCCTCCAAAGGCGCTGTTCCTGAGAGCCGGTGCCTGCCTGCCCAC |
| | | | | | | 171 | |
| | | | | | 1746 | 77935 | TGTCAGCTTTTGCAATTATTGGAATGATGTTCACCTGTAAAACAGACACG |
| | | | | | | 993 | |
| | | | | | 1747 | 90689 | CGGGAAGTTACTTAGCACGGTTCCGGGTTTCTCGCGCCCCGCCTGTCCCC |
| | | | | | | 603 | |
| | | | | | 1748 | 60386 | CGAGACCTGCGGTTGCTTTGGTTTGCCTTTTACTAAGTTCATTTCTCAGC |
| | | | | | | 050 | |
| | | | | | 1749 | 85672 | CGTCCTGACACAGCCTTTGTCAACACTGGCACTCACAGCGGCCGTCGCGT |
| | | | | | | 623 | |
| | | | | | 1750 | 17629 | ACAGGGTGGCGCAGGCTGTTTTCTGGACATTCTGCCCCTCACAGAAAGCG |
| | | | | | | 6727 | |
| | | | | | 1751 | 25033 | CGGCGATCCGCTCTCTGCGCCCTGGGAAAAAGCCCCAGCCATGAGCAATC |
| | | | | | | 893 | |
| | | | | | 1752 | 10288 | CGTTTCATCGGTAGTACCTTGCCCCAGTCGCTGGCTGCCCTTTGCCCTGT |
| | | | | | | 0841 | |
| | | | | | 1753 | 45025 | CCGTTTCAAAACTGTTCTAGCAAGCACTGAAGGAATGCATAGGGTCACCG |
| | | | | | | 080 | |
| | | | | | 1754 | 95155 | CCCCTGCTTAATTTCCTGGGTGTTCGTATTTTAGGCTCTTTGCTTCCTCG |
| | | | | | | 784 | |
| | | | | | 1755 | 19018 | TTTTCCTAGTAATTTATTCTTCAAGGCCCATCAATGTAGTTATAAAAACG |
| | | | | | | 055 | |
| | | | | | 1756 | 24641 | AGCTCTGCATCTCCAACCTGGAACCCAACCCAGAAGTCTCAAGTTTGACG |
| | | | | | | 501 | |
| | | | | | 1757 | 18329 | CGTCAGAGCCAGGGCCCCCAGTTGTGGAAGTTTCTATATCCGGTAAATTG |
| | | | | | | 562 | |
| | | | | | 1758 | 14286 | TTCCCGGGCTTCAGCACAGGTGACTTGGCTGAGGTAGGTGGTGGCTGACG |
| | | | | | | 39 | |
| | | | | | 1759 | 25034 | TGGAGTCTCTCTCCTCCACGTGCTGAGAGGCGCCCTCTGATTGGCTCTCG |
| | | | | | | 151 | |
| | | | | | 1760 | 17443 | CGCTGCGGCCCCCGCTACCGACACCGTCTCGACCCCGCGCATTCTATCCG |
| | | | | | | 0614 | |
| | | | | | 1761 | 11944 | CGCACGTCGCTCCCGCTGCAGCCAGGCCGCTCCCCTGGGACTCTGGTCCA |
| | | | | | | 4909 | |
| | | | | | 1762 | 11707 | CGGCGGCAGCCCTTTAAACCCCTCACCCAGCCAGCGCCCCATCCTGTCTG |
| | | | | | | 0046 | |
| | | | | | 1763 | 37123 | CTCCTTCCCGCGGGGGCTCTTGGGAAGATTCTACAATATTCTAGAGGCCG |
| | | | | | | 671 | |
| | | | | | 1764 | 38066 | CTTCTTCAAAGCCCAAGACCGGTGATGCAGAATGGACTCTGCCAGCTTCG |
| | | | | | | 873 | |
| | | | | | 1765 | 62321 | CCAGGACTACGGAGCTGTCTTCCTCTGTGACCACAGGTGCGTGCAGTCCG |
| | | | | | | 231 | |
| | | | | | 1766 | 10089 | CGGGCGTGGTCAGCACTGCTTTGGGGCTAAGCAGAGTTTCAACATGTTTC |
| | | | | | | 6674 | |
| | | | | | 1767 | 82978 | CGGCACTGCCCAGGGTACACACACCTCACCGACCACGCACGCCGGGCAGG |
| | | | | | | 3 | |
| | | | | | 1768 | 44063 | CCCGAGGTGGCAGTGGGCTCCTGGTACAGCGGATGCGAGTCCGCACTCCG |
| | | | | | | 404 | |
| | | | | | 1769 | 11810 | GGCAGCGCTCGCTGGACAGTGAGGAACTCGCGGAGAAGATGCGCTTGCCG |
| | | | | | | 7876 | |
| | | | | | 1770 | 41260 | CGCACCCGGCCAGAACCCTGGTTCTTTAGGACAGTGACAGCCCAGAGTAG |
| | | | | | | 294 | |
| | | | | | 1771 | 15112 | CGGGATGACTGCAAAGCATTTGTATGGATGGCCATCTCCAATCATCCCTA |
| | | | | | | 8222 | |
| | | | | | 1772 | 43211 | CGCGCCGCCAGCATCAGCACCAGCCCTGACATCACCGCCCGCCGCCCGCT |
| | | | | | | 213 | |
| | | | | | 1773 | 18254 | CGCGGCGCTAGACAACCTGCGCAAGGTGGTGCCTTGCTATTCTAAGACGC |
| | | | | | | 3233 | |
| | | | | | 1774 | 39188 | CGCCCTACAGCCCGCACAGCCCGCACGGCCCTGGTATGGTGGCTCTGCTT |
| | | | | | | 743 | |
| | | | | | 1775 | 16228 | CGCACTGACAGTGTCATTTCACCAGACACCCAAGACTTCTTGGAAGCGAG |
| | | | | | | 4135 | |
| | | | | | 1776 | 11121 | GCATCGGGTCTGTCCGCAGCCGGCAGCGGTGCAGAGCGGTGGGGAGAGCG |
| | | | | | | 6962 | |
| | | | | | 1777 | 26757 | CAGTTACAAGAAGCCGAGAGGTCTTCTTGTCATAAAATTAACTTCCCTCG |
| | | | | | | 706 | |
| | | | | | 1778 | 21000 | CAGAGGGAAGCCGGGGGGTCTGTGCTGGGATCTGAAGGTTTGCAGCCTCG |
| | | | | | | 992 | |
| | | | | | 1779 | 11944 | CGCCCCCGGCTCTGGGCGCCCCGCAGAGCATCCTACTCCGCGGTTGCCTC |
| | | | | | | 5209 | |
| | | | | | 1780 | 52536 | CGGCCGCTAGGGAAGACTTGGCCACCCTCTGGAAGTACCTTCCCCCGGGA |
| | | | | | | 436 | |
| | | | | | 1781 | 13473 | TTTCCGCCCGTGTTGCAAATGCCCGTGGTTGGGTTGGGGGCGGGACAGCG |
| | | | | | | 1585 | |
| | | | | | 1782 | 70235 | TACCGTCTATCATTTCGAGGTCTGCGACTACTAAAACGGTCAGAGTATCG |
| | | | | | | 567 | |
| | | | | | 1783 | 21251 | CGCCCGGCACCTGATCCCTGCAGGGCCCCCAGGGTGGAGCAGCAGCCGTC |
| | | | | | | 86 | |
| | | | | | 1784 | 77089 | CGCGCTGGCAAGTTTGTGGAACACTTTCTAGGAATTAGGTCTTTTCCTCC |
| | | | | | | 518 | |
| | | | | | 1785 | 50886 | CGCCGCCAACGGCATCATCCCCCCGAGGCCCGCCTACGAGGTCTTCGGTT |
| | | | | | | 782 | |
| | | | | | 1786 | 85667 | CGGTGTCCCCGATCGCGCTGAACCACTTCCCAAAGCCTGCGCCCTCGCCC |
| | | | | | | 616 | |
| | | | | | 1787 | 21926 | CGGGATGATACTCTTTCTGGCCAACATCGTCCTGTCACCATAGCCAGCTT |
| | | | | | | 524 | |
| | | | | | 1788 | 73822 | TGGTGCATGAAAGCAAAACCAGAGAGGCGCCTTTTCCAAATGCCAATGCG |
| | | | | | | 8 | |
| | | | | | 1789 | 11154 | GCTGGGCAGGAGCTGAATTCCCGGGAGCTTGCCTGTGTAGACCCAGTGCG |
| | | | | | | 4463 | |
| | | | | | 1790 | 17357 | AAAGGGCTTGGCCTGGCGGCCGGCTGGACTGCAGATGTCTCTTCCAGGCG |
| | | | | | | 619 | |
| | | | | | 1791 | 54852 | GCTGTGCGTTTGACAGGCAGTTGGGAGACCCTGGTGGCCGGTTTTGGTCG |
| | | | | | | 84 | |
| | | | | | 1792 | 14710 | GGGCGACACGAGGGCAGACGGTGTAGCCGAATCGTAGCCAGAGCTGGGCG |
| | | | | | | 8843 | |
| | | | | | 1793 | 62795 | CATTAGCAGCGGTGGCACGGGCTGGCGGAGGAGGCTCCTTTGTAAATACG |
| | | | | | | 807 | |
| | | | | | 1794 | 80992 | CGGCACTCAACTGAAGGCTGATATCAGGCGATTAGACAGCCATGCATTCT |
| | | | | | | 750 | |
| | | | | | 1795 | 83680 | TCTCTTTAGTCACCACTCTCGCCCTCTCCAAGAATTTGTTTAACAAAGCG |
| | | | | | | 326 | |
| | | | | | 1796 | 85996 | ACTAACTTAACCCTGTGTGCGCCTGACACTCCCTAGAGAAGCTGGGATCG |
| | | | | | | 364 | |
| | | | | | 1797 | 11561 | AGGCTCTGGGGTCTCCGCGGAAAATGCCCAAGTGCTACCGCCAGGGAGCG |
| | | | | | | 498 | |
| | | | | | 1798 | 29237 | CGGCCTACCCCAGCCACCCCATGCCCTACAGCTCCGTGTTGACTCAGAAC |
| | | | | | | 480 | |
| | | | | | 1799 | 20125 | CGTGGTGTTTTACCGGGGTATACTCATGAACAACAAATAACCACCGGTTT |
| | | | | | | 1982 | |
| | | | | | 1800 | 67506 | TCTGGTTCAGGAACTTGGGACCCTTCATTATCCCAAACGTTTGAGCTTCG |
| | | | | | | 17 | |
| | | | | | 1801 | 69420 | CGGCACTGTGGAGAGAGGACTTGGAAAATAACTAAGTTGGTTTAAATTGC |
| | | | | | | 45 | |
| | | | | | 1802 | 30833 | CGGGGCGCCTCCTCCACGCAGGCCTCCGGCTTCCTCCAGGCGACCAGGCC |
| | | | | | | 33 | |
| | | | | | 1803 | 12991 | CGCCTCAACCCAGCAAGGCTCAGGACTCTTCCATGCGTGGGCACACGAAG |
| | | | | | | 665 | |
| | | | | | 1804 | 10184 | CGCCCGGCCCAGAGCATTCTTTATAAGGCCGAATAGTTTGCATTTGAAGG |
| | | | | | | 319 | |
| | | | | | 1805 | 62626 | GCTCAGTTCCCCCTCTCTGCTCATGGTTACCTAGTGTGGTCCTCAGCTCG |
| | | | | | | 20 | |
| | | | | | 1806 | 66664 | CGTCTGGGATGAATGATCTTGCCCTAACTTGTGTCCCTATCAACTAGTTT |
| | | | | | | 667 | |
| | | | | | 1807 | 15137 | CGGGACTATGCAAGCAAGGAGGGAGAGGAGCCATTTGCAGGTTTCACACA |
| | | | | | | 4946 | |
| | | | | | 1808 | 88271 | CCCTGAAAATCAAATGGCAGAACCTAAACGGAAGACTCACTGCCAAAACG |
| | | | | | | 572 | |
| | | | | | 1809 | 30734 | CGGCCCCGACGCCCTCCAGGGCTGAGTACCTACACTCACACACACGGCGG |
| | | | | | | 41 | |
| | | | | | 1810 | 11069 | CTTAGCTTCTTGAGGCCCCTGGTCAGGGGATGCAGACCCTGGAGCCCTCG |
| | | | | | | 2918 | |
| | | | | | 1811 | 30095 | CGGTTGCTTTTCAAATACAGCTTTTCTAAAACGCCGCCAGGCACCCGGGC |
| | | | | | | 326 | |
| | | | | | 1812 | 29186 | CGCTCCTCTAGGCTCACATGACCCAGACCCACAGGGCAAAAAGTGCGTCG |
| | | | | | | 183 | |
| | | | | | 1813 | 85402 | CTTCATACTCCCAGACCCAGACAGAGAAGTTTCCCGAGTCATCCACATCG |
| | | | | | | 497 | |
| | | | | | 1814 | 92191 | TTGCTCATCCCAGTGCAAGATCTGTTTATGTTCCTCTCCTTGGCTGTACG |
| | | | | | | 625 | |
| | | | | | 1815 | 69535 | CCTCTGAGCAAGTTGATGGCTATCTCAAAACCTCGAAACCTGTCTCTACG |
| | | | | | | 58 | |
| | | | | | 1816 | 49815 | CGTCCACGCAGCCCTTGCCACGGTAGTCCGGGTACACGTACTCCTCGGGT |
| | | | | | | 502 | |
| | | | | | 1817 | 15975 | TGCTCTCACCAGGCTGCGCGCTGGCGGGTCGGTGCACAGGGACGGGGTCG |
| | | | | | | 6929 | |
| | | | | | 1818 | 34492 | CGGGGCCCTGCACCTGTGCAGCGAAGCTTAGCGTTCATCCGTGTAACCCG |
| | | | | | | 984 | |
| | | | | | 1819 | 65284 | CATTTAGTTCCATCGAAAGGGAATGTAACAATATAACTCACCACTTCCCG |
| | | | | | | 438 | |
| | | | | | 1820 | 10031 | CGGGAGCCCAGCCTTTCCCAGATAGCACGCTCCGCCAGTCCCAAGGGTGC |
| | | | | | | 8080 | |
| | | | | | 1821 | 11513 | CGGACCATTGTGGCTTGCACAAAACCCGCGCCCCAAGAGCCTCTGCCAGG |
| | | | | | | 6226 | |
| | | | | | 1822 | 17713 | CGTCCACCACGACCATTTCTCCCGGGAAGTCGTTGCGCACCGAGAAGAGG |
| | | | | | | 3566 | |
| | | | | | 1823 | 18707 | GGCTCTATCTCCTTGTGGTCATCATAGCCCATTTGGCCCTGGTCAAGTCG |
| | | | | | | 479 | |
| | | | | | 1824 | 70528 | GTGTGCGTGGGGGGTATGCAGCATCCAGTTACATTCCTGACCCACTTTCG |
| | | | | | | 60 | |
| | | | | | 1825 | 12175 | CGACAAGAAAGATACTGAATATCGCCCTCCGAAAATCGGGCGCATTTGAA |
| | | | | | | 8980 | |
| | | | | | 1826 | 49518 | CGGGTGGAGGATTATCAGGTAACACAAGAAGTGTTGCAGACCTCCTGGGC |
| | | | | | | 986 | |
| | | | | | 1827 | 29186 | ACCCTGGGGCTGCTTGCTTCTTCCAGCATGGGAAGCGCTGACTTGATGCG |
| | | | | | | 267 | |
| | | | | | 1828 | 17696 | CGGTGATTTTGAGTCACCCAAGATAAGACACTAACTTGACCTTAACTTTG |
| | | | | | | 9218 | |
| | | | | | 1829 | 20656 | CGGCTTCAGGGATGTCGTAGAGTCTTAGCTACGAATCATCCAATACCCGC |
| | | | | | | 2 | |
| | | | | | 1830 | 18144 | CGCGGATTGCCGAGGGCTTGCAGGCACTCAGGCAGACGCAGACAGAAACC |
| | | | | | | 4989 | |
| | | | | | 1831 | 18891 | CGGGGCCCCCTGACCCCCGCGTTCACCCCTCAGCCCGGCCGCCGGGCACT |
| | | | | | | 6668 | |
| | | | | | 1832 | 28862 | TGGAAGAAACGTCTTCTTCCTGCCAAAACAGACACGCACTGGCTGTCTCG |
| | | | | | | 95 | |
| | | | | | 1833 | 54956 | TCCTTCAGTTAAATAAGAAATCAGGTCCAGAGCCGAGTTCAAGGCATTCG |
| | | | | | | 419 | |
| | | | | | 1834 | 29323 | CATCCAGTTCCCTGCCTCGGAGATAAAGATTCCAGCTACATGGGCAAACG |
| | | | | | | 182 | |
| | | | | | 1835 | 51417 | CGGGGGAAGGGCAGCAACTCGGCGCCCCCCTCAGCGCCTCGCACTACCTC |
| | | | | | | 469 | |
| | | | | | 1836 | 35086 | GGGTCCCGAGTGGGACGGGGGGCTCGGCGGGAAGTTTACCTGGTGCCGCG |
| | | | | | | 890 | |
| | | | | | 1837 | 74799 | AATCATCTGGCTTCTGCAAAGCAGTCGCGCAGCGCTGTAGGGTGAGGCCG |
| | | | | | | 572 | |
| | | | | | 1838 | 11930 | TTACAGACTGTCCTGGCGGTGTCTGCAAGTCGGTAACCCCCCGGGTTTCG |
| | | | | | | 4487 | |
| | | | | | 1839 | 14712 | CTGCCCTTCCCGAAACCAACTTTTCGCTGAGCGATTAGAGACTTCAGACG |
| | | | | | | 6703 | |
| | | | | | 1840 | 67218 | GTCCGGCCGGGGAGGGCCGAGGGCTCTGTTTGAGGTCACCCTGGAGACCG |
| | | | | | | 135 | |
| | | | | | 1841 | 63743 | CGGCCCATCCTGGTCATGTTACTGCATTTGTGGCCGGCCTCCCCTGGATC |
| | | | | | | 837 | |
| | | | | | 1842 | 10006 | CGCGCCTTCCCAGGCAGGAACTTTGCGACCCCACCCCCTGGGCCCGCCAC |
| | | | | | | 1111 | |
| | | | | | 1843 | 67090 | CAGGCGCTTCGCAGGTGAGCCGGGTGCTGCCGCCTCTCTGCAGAGAGACG |
| | | | | | | 581 | |
| | | | | | 1844 | 10335 | CGCAGCCAGCCCCACCGCCTCCGGACTCGACCCCACCATAGCCCCGCCGT |
| | | | | | | 9572 | |
| | | | | | 1845 | 26250 | CTATTTATAAAGGCAAAGTCCTTCTGATTGGTCCGAATCTTCCAGTTTCG |
| | | | | | | 934 | |
| | | | | | 1846 | 14646 | CGGGTTATCTGATGGAAGTAGTATAGAGTCATCATTAAAAGTAGAGACTT |
| | | | | | | 1855 | |
| | | | | | 1847 | 15402 | CGTGGCTGATCACCCCAAGAGAAGTCAACCCCAGGCGGGCGGTTACGACG |
| | | | | | | 6930 | |
| | | | | | 1848 | 10100 | GAGGTCTGGCTTTCGGGGTGTTAGGCTCCAGGGACCTCCTGCGGAGCTCG |
| | | | | | | 6930 | |
| | | | | | 1849 | 13561 | AACATACAGGCACAAAAGGGCACATACACACTCTCAAAACCAGAATGCCG |
| | | | | | | 5376 | |
| | | | | | 1850 | 10091 | CGGGGCCGACTCGTGTCACTCAGCCCTATTGGCCAATGAGCGCCTCGCCC |
| | | | | | | 2946 | |
| | | | | | 1851 | 23350 | GCTTTTCCCTCCGCGATCATGGTGAATCAGCAAAGCGCTGCAGAGCAGCG |
| | | | | | | 552 | |
| | | | | | 1852 | 27259 | CGCCACAAAGACGTCAGGGATTAGGGTCGCAGGCGCCTTGTTTAATGGCC |
| | | | | | | 010 | |
| | | | | | 1853 | 29760 | TGGGGAGTAGCTAGGGGCCTGCCCGGCGGGGGCGCAGGAACCCGGTTGCG |
| | | | | | | 164 | |
| | | | | | 1854 | 38080 | CCCCAGCAGAGCGAAATATCCTGAAGTAGCTTTCTTTGCCCCAATTTGCG |
| | | | | | | 364 | |
| | | | | | 1855 | 85996 | CGTTCGAAACCTGTCGCCGTCACTTGCGCGTTTGGCATTATCCATTGTCA |
| | | | | | | 495 | |
| | | | | | 1856 | 33169 | AGCCCACCGGAAGCAAAACTGAGCAAGATCTGAAGTAGAGAGCGATGCCG |
| | | | | | | 600 | |
| | | | | | 1857 | 12405 | CGGCTCAGCCCCATAAGGTAGAGCAGCATTTTGGGACAAGTCACTGAGGA |
| | | | | | | 6244 | |
| | | | | | 1858 | 14714 | CGGCGCATGCTTGGGACTGAGTCTACAGAACTACTTCTGGAAAAAATCCT |
| | | | | | | 1588 | |
| | | | | | 1859 | 87975 | CGGCACTTCTGTGTTCATGTGTGTACAAGGTGGTATGTAGCCCACGCATG |
| | | | | | | 812 | |
| | | | | | 1860 | 11381 | GAGAGAAAGTTTGCTAGCCACGCGGCTTGCTGAAGCACGTCTGGGCTTCG |
| | | | | | | 6304 | |
| | | | | | 1861 | 15725 | GGACAAGTGGCTGTGAAATCGATTGTGAAGCGTGACCTTCCATCCCAGCG |
| | | | | | | 196 | |
| | | | | | 1862 | 14712 | CCCTCGATTAACCTGTCTTTGCCTAGCGCAAAGTCTATTCAACAACTGCG |
| | | | | | | 5714 | |
| | | | | | 1863 | 76924 | CGAGAGTTCCTCAGATGAACGGTGTCCCTGGGGCAGTGGCGCGGAGGGCG |
| | | | | | | 190 | |
| | | | | | 1864 | 57269 | CGCTTTACTCAATGCTCAGTGAGTCATGAGGTGGCTGCCCCCAGGCCTCC |
| | | | | | | 634 | |
| | | | | | 1865 | 68449 | CGACGAGGAAATACTAACAAGGGACAGCTCTGTGGTTTCTGCTATCGAAA |
| | | | | | | 0 | |
| | | | | | 1866 | 11944 | CGCCAAGTAGCGACTCTTTAAGCCCTGGGCCACCAACCAGCCCACTCCCC |
| | | | | | | 3277 | |
| | | | | | 1867 | 33715 | CGGGATCTGGCACACGCCTAAAGCCCTCTCAGTGCTATCTGTATTCCGTG |
| | | | | | | 66 | |
| | | | | | 1868 | 60992 | CGCCCGGCGGCATCTCCCGTTTTTTTGTGGCATAACAGTTGACCAAAATA |
| | | | | | | 50 | |
| | | | | | 1869 | 19615 | GCAAGTGCAGAAGGTCCTAGTAGCCGAGCGTGGAGTCGAGCTCGTGGGCG |
| | | | | | | 358 | |
| | | | | | 1870 | 45008 | CGGGACCTCATGCAGCTTGGCAGATATCTGAGAAATGGTTTAATTCATGC |
| | | | | | | 526 | |
| | | | | | 1871 | 60985 | GCCGGCCTGGCGGAGGGTCAGGTGGACCACAGGTGGCACCGGGCTGAGCG |
| | | | | | | 645 | |
| | | | | | 1872 | 21984 | CGGGCTTCCCAATCACTAGACCCTGGCTACTGCCACCTGCTTCACCCTCC |
| | | | | | | 8580 | |
| | | | | | 1873 | 45148 | AGTGAGAGAGCCGGATAAGTACCATTGCTGCTTGATTGCTGTCCAAGTCG |
| | | | | | | 557 | |
| | | | | | 1874 | 21439 | TTCGCGGAGGGGCGGGGCTGTGGGGGCTGTCTTCCTGTGTTTTCTCTCCG |
| | | | | | | 42 | |
| | | | | | 1875 | 32712 | GTCCATCTACAGTTTCGACGAGACCAAAGACTTGGATCTGGAAGACATCG |
| | | | | | | 623 | |
| | | | | | 1876 | 53312 | GGCTTTCCGCCTTAGGTCAACGTTGTAGAAAAGCAAGTGAAGGTTTCACG |
| | | | | | | 966 | |
| | | | | | 1877 | 11192 | GGGAGGCTGCGGTGCTGGAGCGAGGATGCGCAGACCGAGGCAGGGAGGC |
| | | | | | | 9547 | G |
| | | | | | 1878 | 11377 | CGGCAAGTGACATGACATCATTCATAAAGAAATGGGTATAAACAGGATTG |
| | | | | | | 8957 | |
| | | | | | 1879 | 25282 | CGGTTGCACCTCTGGGGTGGAACATCTATAAAATTTAGATAATGATACCC |
| | | | | | | 664 | |
| | | | | | 1880 | 11421 | CGGGATCCCAGTTCGTTTAATTGCACCGCTTAGTTTACATTTCAATGGCT |
| | | | | | | 4093 | |
| | | | | | 1881 | 16626 | CTCTGAAGTTTGGGCTCATTGCCAGTTTAAGTATATGCTGCCACCTTTCG |
| | | | | | | 2886 | |
| | | | | | 1882 | 49311 | CGCTCATTCACAGGACTTTATTCAAGAGGTTCGTCCAGGAGTTTTGATTG |
| | | | | | | 934 | |
| | | | | | 1883 | 16374 | CGTACAGATCTTTTCCAGAATAAAGCATTATTCGGCCAGGACGCCTCAGC |
| | | | | | | 6145 | |
| | | | | | 1884 | 10886 | CGGGGCAAAAACTTGGAACAGCTACCACAAAGCGAACGCCTATCTGTTTG |
| | | | | | | 967 | |
| | | | | | 1885 | 37136 | CGGCCCTTCAGAAGCGCCTTCTTTGGTTAACTCTACCCCCAACGAGAGCC |
| | | | | | | 192 | |
| | | | | | 1886 | 35870 | TCGGTGAGGCGGGTGGGCTGGCGGGAGCTCTTCCCGAAGTGCGTTCTACG |
| | | | | | | 38 | |
| | | | | | 1887 | 44325 | AACGAAGTATGCCATCTGTTTCCGTTATCAGTTTATTGCTCTCACCTCCG |
| | | | | | | 008 | |
| | | | | | 1888 | 96180 | CGGGACTCTGGGCCTCTGCTGGGAACTCACAGTCGACACCAGGATGCCCA |
| | | | | | | 847 | |
| | | | | | 1889 | 27858 | CGATGATCTGATCCTGATTGGTCAGAACTGTTGTAGGAAAAACCTGGTTG |
| | | | | | | 637 | |
| | | | | | 1890 | 46544 | CGTGACTCTGAAAAATTATAGACAGTGCAGGTCTGCAGGTGAACTGAGAC |
| | | | | | | 711 | |
| | | | | | 1891 | 20359 | CCTATTTTCAGTAATCTGATTAGGGGTCGATGTTGGTGGGCTCGGGGACG |
| | | | | | | 8594 | |
| | | | | | 1892 | 12194 | GCCCAGGTTCTACAGAGTCCAGGGATCTCCTTTCTGCACCCACCGTAGCG |
| | | | | | | 0381 | |
| | | | | | 1893 | 19574 | CGTCACCCACACAAACCTGACCTTCACGTGGGGCGCGGGACCTTGCGGGG |
| | | | | | | 96 | |
| | | | | | 1894 | 39659 | CGAACAACCCTGTTGAAGGAGAAGTTACCTTCTGTAGTGTGCTGGGAATT |
| | | | | | | 249 | |
| | | | | | 1895 | 20001 | CGGGTTCCCATAGCAGCCAGACCCACAGGTCAGCCTCCGGGGCTTCAGCT |
| | | | | | | 0137 | |
| | | | | | 1896 | 11568 | AACTTCTCTCTTTTCCTTAACCAAACACCAAATTCCCTCCAGGATTGTCG |
| | | | | | | 257 | |
| | | | | | 1897 | 11052 | CGGGTGAGGCATCGCTCCTGAAGAATTAATCAGAAACTCAGAAAAATTCC |
| | | | | | | 2297 | |
| | | | | | 1898 | 30908 | CGGTGATCTAAGCCCTGAGCCCAGGTCCCTGAAACCTCAGCCCCAGGCCT |
| | | | | | | 233 | |
| | | | | | 1899 | 20000 | TGTTGAGAGCAGAGTTCAGGGCTGGTGCACTCTGCGGTGCTGAGTGGGCG |
| | | | | | | 9927 | |
| | | | | | 1900 | 23581 | CCTGCGGTGCCACAGGGACGAGGCCTGGAGAGCAGTCGCTCCTAGAACCG |
| | | | | | | 4009 | |
| | | | | | 1901 | 48537 | CGGCCCCAGCCCATCAATGAATGGGGCTGAATCAACAGTGAACAAAAATG |
| | | | | | | 06 | |
| | | | | | 1902 | 15847 | CGGGGTGTTCCTGCTCCGTGGCCTCCATCCCAGCCGATCCCGCTTTGCAG |
| | | | | | | 8734 | |
| | | | | | 1903 | 23633 | CGGGAAACCACACGTCTAAAGCGTCCCATCTGTAAACTCTTGCTTACTCT |
| | | | | | | 680 | |
| | | | | | 1904 | 29912 | CGGAGTCTCAGCTACGAATCATCCAATACCCGCAGGTCACAGAGCGACGG |
| | | | | | | 1 | |
| | | | | | 1905 | 13780 | ACAAGATTGGATTCGCCCCTGCCACTTTAAGAACTCGTGAGTCTACCACG |
| | | | | | | 6993 | |
| | | | | | 1906 | 13530 | CTTTTGGGCGCGGCTCGGGGGTGGAAGCCCTGGGCGACAGCACAGCTTCG |
| | | | | | | 923 | |
| | | | | | 1907 | 10540 | GAGGCGGGTTGCGATGGCAGCGCTGGGCTACAGACCCCGCCTTATTTGCG |
| | | | | | | 1673 | |
| | | | | | 1908 | 11671 | AAGTGGGAGCCCTTCCCCCATCCCGGGCGTTGTTAAAACCCAGTGGGGCG |
| | | | | | | 1077 | |
| | | | | | 1909 | 16029 | AGCTCACCTGAGAATCTGCACACCCAGATGCAGGTGAGCACCGGGTCTCG |
| | | | | | | 14 | |
| | | | | | 1910 | 63784 | GTGGCTTGAATAAGTCGTTGGCGCGATGTGAGATAGAATCATCATGCCCG |
| | | | | | | 454 | |
| | | | | | 1911 | 79085 | CGCAGTTGTTCTGAGGAGAAATTAGGAAAAGGTATGCAGTTACACAATGC |
| | | | | | | 713 | |
| | | | | | 1912 | 32223 | CGTGGTATCTCGCAGTTTGGCTGAAACCTGAATTAAATGCAATGCTTTTT |
| | | | | | | 226 | |
| | | | | | 1913 | 25034 | GCCCGGACTGGATTCCAGAGGGGCAGGCGGGGGTGGGGGCAGCGGGCAC |
| | | | | | | 241 | G |
| | | | | | 1914 | 99275 | CGGGTCCCTCTGCTAGGACCGCGCCTTCAACGCGGAATCGCTGACATGAG |
| | | | | | | 335 | |
| | | | | | 1915 | 11913 | CGTGCTGTGAAACTGGACTTTGATTTAACCCCTGCGAGAGGAAATTCTGA |
| | | | | | | 0048 | |
| | | | | | 1916 | 56951 | CGTCCTGCCCAACTATGTAGCGTGCAGGCCTCCATCTTCCACATGACTGC |
| | | | | | | 337 | |
| | | | | | 1917 | 18891 | CCTCCCTAACCCTGGCGGAGCTGATGGGTGGCTGTAGCCTGATTAGACCG |
| | | | | | | 6865 | |
| | | | | | 1918 | 59001 | CGTCGAGGTGGCAGGGAGTTGCTGGGAGAGCACAGCGCGGAGAGGGACC |
| | | | | | | 158 | G |
| | | | | | 1919 | 11643 | CGCACCGGCCCTCCCCCAATCAGCCCCAGCAAGAGGAAGTTCAGCATGGA |
| | | | | | | 427 | |
| | | | | | 1920 | 50265 | TGACCCGGAGGACGCGCCTACGGAAGAGACGTCTGGTCGAGGGGGTGCCG |
| | | | | | | 443 | |
| | | | | | 1921 | 14020 | GATGGTGAGGACTACAAAGGTCTCCCCACCTCCCGGGGGCCGCGGAGGCG |
| | | | | | | 1433 | |
| | | | | | 1922 | 85997 | CGCAGGCGCTCTAGAAAGGCGTGATGGCCCCAGCTCAGTGCCCGCCAGCC |
| | | | | | | 519 | |
| | | | | | 1923 | 87240 | CTTGAACATGACCCTGCGAGGCGGGCCGGGAGGGGGCGTGGCATGCTGCG |
| | | | | | | 60 | |
| | | | | | 1924 | 11960 | TCAAAAGCTCTGTCACATCGCGCTGGCAAGACGCTTAATCAAAGTGAGCG |
| | | | | | | 7603 | |
| | | | | | 1925 | 70947 | CGGAGCTCTACATCAGAGGGCATTTAATTGGCCTTGAAATTTTCGATCGA |
| | | | | | | 218 | |
| | | | | | 1926 | 25034 | CGCCCGCTGCTCACTACACTTGTTACCGCTTGTCCTGAGCGCGGAGAGGG |
| | | | | | | 093 | |
| | | | | | 1927 | 33701 | CGGAGCCTGCCTCAGCCGCAGGCTCCATAAACCCAGCCAGGAACCAAGCG |
| | | | | | | 321 | |
| | | | | | 1928 | 53097 | CGGCTGCGGATCAATACCCGCTCACTGTAATCCCAGTAATTGTAGGGCTC |
| | | | | | | 649 | |
| | | | | | 1929 | 51128 | AGAACGTGGGGCTCAGCATCGCCGTGGTAGACTACGACTGGTGAGGGGCG |
| | | | | | | 640 | |
| | | | | | 1930 | 15472 | GGGCTTGCTCCCCTAACCAAGGCGCTTCGGGATCGCGGGGCTGGTGTTCG |
| | | | | | | 9622 | |
| | | | | | 1931 | 16051 | CGGATACTTTCCAGGGAAGGAAATAAGACAGGAACATGTGCCCTAGTGGA |
| | | | | | | 4445 | |
| | | | | | 1932 | 22369 | AGTGTTTCCTCTACATCTCGACCCATTGCTGTTGGGAGCGGCACCTTACG |
| | | | | | | 908 | |
| | | | | | 1933 | 21682 | CGCGGAGTTTCGTTGTGTTGTTACACAAGCCAGCTTTTGGTTTGTTAGTT |
| | | | | | | 362 | |
| | | | | | 1934 | 79620 | CGCCCTCCGCGCCGAGAATGCGCCCTTCTGCCCGGGCTTGATATCACTTT |
| | | | | | | 363 | |
| | | | | | 1935 | 17695 | CGAGCAGAGAAGACATCTTCCTTGGTTTTGCTCTGCGGGGCTCCCCGCAG |
| | | | | | | 25 | |
| | | | | | 1936 | 79611 | CGAGTATGAAGTCGTAATCCCATAGCTGTGAGTTCAAGTCTGGAATTCTT |
| | | | | | | 11 | |
| | | | | | 1937 | 11098 | CGCGGGACCAAAGCTTCCGGCGTGTCCCCAACTTTGTGGCGCCCTCAGGC |
| | | | | | | 6685 | |
| | | | | | 1938 | 14938 | AGCGGCTCCGAAGTGGACAGGTGGCTCCCCAGGGTGCGGAGGCGAGGGCG |
| | | | | | | 9929 | |
| | | | | | 1939 | 10131 | GTTGCATGAACGAGTGGTGTGAAGCCTGTTGGGTAGCTTGGCCACTCCCG |
| | | | | | | 7620 | |
| | | | | | 1940 | 25454 | TGATGGTGTTGCAGGCTGGCCCAGGGACTTGTGGGCTTTGGGCCAGGTCG |
| | | | | | | 202 | |
| | | | | | 1941 | 85416 | CGAGCCCTCTCGGGCCCCGCCAAGTATTTTGTTTGTTCGAAAGTCTTCTC |
| | | | | | | 865 | |
| | | | | | 1942 | 38676 | CGTTGCTTTGCTCGGTAAGATCCCTGCAAGCCTTTATTTGAAACTAGCCT |
| | | | | | | 865 | |
| | | | | | 1943 | 13991 | CGCTGGGTACCTCCTACAAGGCCTTTAGTCCAGGCATGAAGGCAGTTCAG |
| | | | | | | 8866 | |
| | | | | | 1944 | 11138 | CGCTAGGGGGATACATCGACGCCGAGATCCAGAACTGCTTAGCCAAGTTG |
| | | | | | | 5659 | |
| | | | | | 1945 | 10887 | AAACTTGGAACAGCTACCACAAAGCGAACGCCTATCTGTTTGGAATTTCG |
| | | | | | | 023 | |
| | | | | | 1946 | 29975 | CGCGGGTACCAGGGGCCATGGGGAGCCTGCTCGATCTCCTGTAGATCTCC |
| | | | | | | 366 | |
| | | | | | 1947 | 41026 | CGTGTGCTGTAATTCTAAGGAAAACATTAGTAGCCTATTTTTAGCAAGTA |
| | | | | | | 197 | |
| | | | | | 1948 | 12195 | CGCCTCTCGGCTCTCAGCAGCTCCAAGCCCCCGCCACAGCCCTCCGCCAC |
| | | | | | | 6890 | |
| | | | | | 1949 | 28677 | TTGTTTAGAAGAGTGAAACCTTCTGTCTTGCCGTGGGCCTGGTGAAAACG |
| | | | | | | 272 | |
| | | | | | 1950 | 87908 | GGAAACTCTAAAGCGCCGGATAAATAAGCGCTGCAACAGGCAACCACACG |
| | | | | | | 785 | |
| | | | | | 1951 | 91036 | GTATCTTTAGACCTTAGCGCATCCATCTCTCGGTTCTTTCGTCAAGACCG |
| | | | | | | 807 | |
| | | | | | 1952 | 21252 | CGGCTGCTTCACGGGGCAGGAGGGCACCTGGAATCCCCCGCCAGGTCCCT |
| | | | | | | 43 | |
| | | | | | 1953 | 17610 | CGGGGTTCGAGTCGCAGCCTCCAGCCTCAACCCGCACCTCCCGCCCTGCA |
| | | | | | | 7201 | |
| | | | | | 1954 | 55322 | CGCCATTTTGTCAAGGGAAAAAGCAGATGGAGGTCGTGTATATACAAATA |
| | | | | | | 753 | |
| | | | | | 1955 | 32173 | CCCACTGGCAGATGCCTTTGGTAAGCTCGCCAATGGCAGGCTTTCATGCG |
| | | | | | | 206 | |
| | | | | | 1956 | 37268 | GGGATCGCATTTGCTCCTTCTTGGACTCTATGAATCTTATCCTAAGTACG |
| | | | | | | 58 | |
| | | | | | 1957 | 38821 | CGATGCAGCATCTATTGGGGAAGGAATTTAGCTTCTACTGCAGTGTGACT |
| | | | | | | 155 | |
| | | | | | 1958 | 51522 | CGGCGACTCCCAGGTGAAGCTACCTGCACCCCACCCGGGTTGGGGTGGAT |
| | | | | | | 894 | |
| | | | | | 1959 | 49629 | CAAACGCCGCATAGGTGGGAGGGCGGCGGTTTGGAACATTCTGCCATCCG |
| | | | | | | 9 | |
| | | | | | 1960 | 36132 | CCCTACTGGGCCTGGTGGAGGATTGGGTGGGCCTTCACTCCTGCTCCACG |
| | | | | | | 561 | |
| | | | | | 1961 | 55304 | CGGAAAAAACTATCCTTGAGTGAGGCCTGACACTGTGCCTGTGATGATGT |
| | | | | | | 314 | |
| | | | | | 1962 | 26273 | CGGTATCACTTCGGCTGCGAACATGCCTGAACCAGCTAAGTCAGCTCCCG |
| | | | | | | 182 | |
| | | | | | 1963 | 33842 | CGCCGGCGGGACAGGCACTTGGAAAGCAAGATCCAGGGTTCTGAAGATTA |
| | | | | | | 301 | |
| | | | | | 1964 | 31881 | GCGGTCTAAAGTGTTTACTCTGCTTCTTCTCAGAAATGGCTTTGATAGCG |
| | | | | | | 72 | |
| | | | | | 1965 | 57265 | CGGGCCTGGGGGGTCACCCACAGGAAAGGTGAGATTAGCAGCACCATGTG |
| | | | | | | 560 | |
| | | | | | 1966 | 22369 | AGCCTCAGCTGTGTCCTTAGAGGCCTGAAGTCTCTCCTGGCCTCACTCCG |
| | | | | | | 802 | |
| | | | | | 1967 | 69915 | CCCCTAGTGACACAGCCAGTGCCAGAACTAACTTTGACTTTCACTCTTCG |
| | | | | | | 406 | |
| | | | | | 1968 | 96897 | CGCACTACGAGAAGGGGAGTTTGATCTTGTCTCATTGGCGTCTCGGGTCT |
| | | | | | | 414 | |
| | | | | | 1969 | 25890 | CGGAGACAGCGGCAGGGATGCGGCTCTGCTCTACAGGCAGACAGAAACTT |
| | | | | | | 808 | |
| | | | | | 1970 | 10531 | TGGCCAGGGCCCTCATCCAGGAGCCAGGAAACATCTACTACCACGAGTCG |
| | | | | | | 9558 | |
| | | | | | 1971 | 17267 | GGATTCCGAGGATCCGAGGGAGTCGCTTTCAGACTTCCGGTGTCCTTTCG |
| | | | | | | 0879 | |
| | | | | | 1972 | 10190 | CGGTTTGGTATCCATCCGCTGCTCCCTCCAGCGCGGCTCTTCGCGACCTC |
| | | | | | | 6035 | |
| | | | | | 1973 | 61128 | TTGTATCCTAAATCTGGTCCTCAAGATTCTTGAAGTCCCCCAGTCCATCG |
| | | | | | | 572 | |
| | | | | | 1974 | 33700 | CGCGGCAGAGTTCGCGGGCTTAGCAGACCCGCCCATTGGCTCTTGCATCT |
| | | | | | | 759 | |
| | | | | | 1975 | 83961 | TGGAACCGGGAGTCGTGTCAGCACATCCTTGAGAGGCAGGGGTGTGGACG |
| | | | | | | 63 | |
| | | | | | 1976 | 13345 | CGCAGATGAGTTAGAGACACAGAGAAGTGTACATCCTTCAGCCTTTCCCG |
| | | | | | | 3019 | |
| | | | | | 1977 | 91580 | GCTGTGCTCTGTTCCCTTCTGACTTACTGTTTGTTTGGGGCGTCTGGACG |
| | | | | | | 605 | |
| | | | | | 1978 | 46917 | GGAACCGCTGCCTTTCAGGAAAGGTGCTGACGTGGGCCACTGCCGCTTCG |
| | | | | | | 018 | |
| | | | | | 1979 | 14062 | CGGACCAGTGTCTCCGGAGAATGCTATTCTCCTACATTTCCGAACAGGTT |
| | | | | | | 5004 | |
| | | | | | 1980 | 10503 | CGGATGGGAAACCTCAGTCGTTTAGGCACCCCTCCGCTCGAGTCACTTCC |
| | | | | | | 6611 | |
| | | | | | 1981 | 29293 | AGTGGCTAGTGGATCGTGCACCCACCCTCGGAGGCCCGGAGTGGATCCCG |
| | | | | | | 279 | |
| | | | | | 1982 | 14240 | CGGAAGTGAGCTGGATGACAGGGATCAGTTTGCAGCCCACCTTGCCAAAC |
| | | | | | | 9417 | |
| | | | | | 1983 | 79817 | GGCATTACAATACCAGAGGTAACGAATCAATTAAATCCATTTTCCCCTCG |
| | | | | | | 278 | |
| | | | | | 1984 | 46999 | CGCTGTGGCCTGAGACGCTTTTCTTAAAGGTCCCGATGACAAGGACTTGG |
| | | | | | | 274 | |
| | | | | | 1985 | 89951 | AACTCTGAAACCTGAGGGCCTCTGCCGGAAGCTGCTGTTCGGCCCATCCG |
| | | | | | | 787 | |
| | | | | | 1986 | 10542 | AGAGAGAACGGTTAGGCAGGCAGGAGGTCCACAGTGAGTGGCTGCAGGCG |
| | | | | | | 8506 | |
| | | | | | 1987 | 76102 | CGACAGAGTCCACGACGATGGCCGAGGGAACAACACTGTCCCGTCCCAGA |
| | | | | | | 450 | |
| | | | | | 1988 | 36919 | TAAAGAGTAAAATCACGCGCAATCCATCCCAATATAACCGCAGTTGTTCG |
| | | | | | | 905 | |
| | | | | | 1989 | 15302 | AAACCCCTGGTACCTGAGCACTGATCTGCCTTGGAGAACCTGGTGAGTCG |
| | | | | | | 9939 | |
| | | | | | 1990 | 13702 | CGGATTTGAACCAAGAGGCCATGAGATGGTACCTTGTTTTGTTTTTAGCA |
| | | | | | | 8617 | |
| | | | | | 1991 | 10089 | GCTCTCTGCGAGAGTGCGGGTGGCGGCACGGCCGGGTTAGACAAGGCTCG |
| | | | | | | 5050 | |
| | | | | | 1992 | 15717 | AGAGAGATATGTAAGGCCCAGGGAGCCGATGGCGCCCTGCAGTGACAGCG |
| | | | | | | 8731 | |
| | | | | | 1993 | 11061 | GCTCACTCGTGTGGACTGGAAACGCTCCGAGCCGGTTATTTTAAAAACCG |
| | | | | | | 0899 | |
| | | | | | 1994 | 16216 | TGCAAAGCCTGGGAACAGTGAGGGCATTAGGACCAGGAGTGACGCGCACG |
| | | | | | | 100 | |
| | | | | | 1995 | 17783 | TGGGGGGTTTGCGGTGGGCGGGCACTGCGCTCTTGGACACGTGGGTGGCG |
| | | | | | | 331 | |
| | | | | | 1996 | 19146 | ACCCAACGGAGGGTTTATTCTGCCCAGCTTCACATCTGGGGGTCAAATCG |
| | | | | | | 324 | |
| | | | | | 1997 | 21525 | CGCCCCGGCGTCTTTGTGCGCGAGCCTCGTTCAGCCCCTCTTCGCATGTC |
| | | | | | | 6262 | |
| | | | | | 1998 | 10510 | CGCCTGGGGCCTGAAGCTCGTGGAATCACCCGCCTCACGTGTCTTTGCGG |
| | | | | | | 3075 | |
| | | | | | 1999 | 23716 | ACGAGAAGGTGCCACTCAAACCTGAGTCAAGGAACACAGCTAAGTCCTCG |
| | | | | | | 8540 | |
| | | | | | 2000 | 23834 | AGGGGTGCCTGCGTGCTGGTTGCTGCTGCCCGGGGCGAGGCGCCGTAGCG |
| | | | | | | 977 | |
| | | | | | 2001 | 91957 | GCGTCGGCTGTGATGGGGAGCCCGGAGCAGCCAGGCGGCGAGCAGTAGCG |
| | | | | | | 989 | |
| | | | | | 2002 | 48145 | AAGGGGTTCCCCGCTTGAGCTAACGTAGTGGTGGCATCCAGAGGTGAACG |
| | | | | | | 000 | |
| | | | | | 2003 | 43276 | CGGGCCTCACCGAAGAAAACAGGTTGCTGGCAACGCGGACAGGTCCAGCT |
| | | | | | | 478 | |
| | | | | | 2004 | 11052 | CGGCCAGGAGACCCTCCCTGTGCAGGCAATGCCGGGTGAGGCATCGCTCC |
| | | | | | | 2265 | |
| | | | | | 2005 | 52276 | TTACTCGAGAATCAAAATAAAGAGGCGAGCCAGCGTTCCAGAAAATCACG |
| | | | | | | 947 | |
| | | | | | 2006 | 50792 | CGGAATTACCTGATTTGTGCCTGGATTTACTGATAGTAATAAGAGTGATG |
| | | | | | | 868 | |
| | | | | | 2007 | 76059 | CGGGGTCAGCCTCCTGCCAGCTCTCATAAGTAGATCTAATTATGACCGCT |
| | | | | | | 576 | |
| | | | | | 2008 | 87974 | GGTGGCTCTTGGTGCAGGGCATGCTGCTCTCGGAGGAGTTGGGGTCTGCG |
| | | | | | | 446 | |
| | | | | | 2009 | 97499 | CGGGCCTGGGTTTAGGGTCCACAGCTCTTGCCAAATTCCAGAGGCTGGAA |
| | | | | | | 987 | |
| | | | | | 2010 | 29795 | CGCCCCCAGGCTCCCACTCCATGAGGTATTTCAGCGCCGCCGTGTCCCGG |
| | | | | | | 815 | |
| | | | | | 2011 | 14143 | CGAAGACCTGTATTACAGGTAGTCACTTGTCTGTATTAATACTGAGATGT |
| | | | | | | 8973 | |
| | | | | | 2012 | 32455 | CGCTGTGCTTAGTCAGGATACAAGGAGGGAACTCGGCACACGATAAGTAT |
| | | | | | | 362 | |
| | | | | | 2013 | 34819 | CTCACTGGAGGGGACGGGTCTGGAGCAGGCAGAGTGAGCCGCTGCTTGCG |
| | | | | | | 740 | |
| | | | | | 2014 | 97646 | TTTGGAACCTCTGCAAACACTTTCTCCTGGGTCAGTTTCCCGCCAAACCG |
| | | | | | | 803 | |
| | | | | | 2015 | 13325 | TGTTTTCCCTCTGCGATGTCCTCTTTTAATTCACTAGGTCAGGAAAAGCG |
| | | | | | | 6591 | |
| | | | | | 2016 | 13650 | CAGGATCCGGAGGCAGCGCCCTGTGCAACTTTGGCAACTCGGAGGACGCG |
| | | | | | | 9451 | |
| | | | | | 2017 | 27339 | CAGTATTCGCACACTGATAAGAACACCTCCCCATAATCCCCTGGCCAGCG |
| | | | | | | 4 | |
| | | | | | 2018 | 39864 | CGGCGTGTGAGCTTTGTCCTTTGGTGGGGCTCCTGGCCACGGGCCGAACG |
| | | | | | | 984 | |
| | | | | | 2019 | 57976 | CAGGGGACTGGGGACCGAGCAGGAGCTGGCGGGGTGAGCTCTGCGAAGCG |
| | | | | | | 756 | |
| | | | | | 2020 | 22316 | CGCTCCACTCAGGCCTGGACAGCCAGCCCGCTGTTATTTTCACCTGTAGT |
| | | | | | | 6909 | |
| | | | | | 2021 | 47425 | ATGGAGGGAAGTCACTGGTCACACAATACCCTTTGGGTCGGTGTGAATCG |
| | | | | | | 198 | |
| | | | | | 2022 | 17825 | TGGGCGGAAGGCATCCCGGTCCCTGAAAGTAGGGACCCACCTCTCTTTCG |
| | | | | | | 7923 | |
| | | | | | 2023 | 10184 | ACCTCGCAGGAGGTGACAGGAGGACGCTGGGTCGAATCACAGTCCTAGCG |
| | | | | | | 9938 | |
| | | | | | 2024 | 96898 | TTGTGACATAGTTGTAATACAAACTCAGCCGCCTTGCACTGCATCTTGCG |
| | | | | | | 476 | |
| | | | | | 2025 | 30292 | CGCAAGTAGTATGACATATAACAGGGCTTGGCAAATCTTTGCTGTAGAGA |
| | | | | | | 899 | |
| | | | | | 2026 | 12844 | CAAGAGCTCCTAATTCGGTGACACTACACCACAATATGTGTGATAAGTCG |
| | | | | | | 6370 | |
| | | | | | 2027 | 11489 | CGAAAACACAAATAGTAAGTGGTAAGAAGGGCTGAAGTTACTACCTACTG |
| | | | | | | 1274 | |
| | | | | | 2028 | 26250 | CACAAGTCCTATCACACTACATAATTCAGGGCGCGAAACTGGAAGATTCG |
| | | | | | | 919 | |
| | | | | | 2029 | 10831 | CGTGGAGGTGGAGCAGGACAACAAGATGACCCCCGGGAACCTGGGCATCG |
| | | | | | | 93 | |
| | | | | | 2030 | 91580 | CGGCAGCTAGCCCGCCCCAGTTCTTAAAGCTGCAGAGCTGCTGGCAGCTG |
| | | | | | | 380 | |
| | | | | | 2031 | 57646 | TTGAAGGTAGCGAGGACTTATTATCACAGTATCCTTTGAAAACCCATTCG |
| | | | | | | 138 | |
| | | | | | 2032 | 10091 | CGCTTTGGGGACTGCGTTTTATCCACGATAAACCATTTCCCGAGAAAGGG |
| | | | | | | 3948 | |
| | | | | | 2033 | 20033 | GCAGGAGTAGTGAGCGATGCCGGGGCTGGCTTTCCTAGATTTAGGAACCG |
| | | | | | | 4137 | |
| | | | | | 2034 | 36105 | GGCTCTCACCTGAACCCCGAAGCGTAGTGTCTTCTCTCTGGACTAAAGCG |
| | | | | | | 364 | |
| | | | | | 2035 | 50889 | AGTTTCCGTGCGCCCGAGAGCGTGTGAATTGCTCCTAATTACCGTGTCCG |
| | | | | | | 427 | |
| | | | | | 2036 | 16024 | CGCGTGGCAGGCTCCCAGAGGAGAGGGCCCTGTTATTTACGTCTTTGTCA |
| | | | | | | 81 | |
| | | | | | 2037 | 38892 | TTCTTACCCCCTGTATCAAAGAGTTAAAATCTAATTTTTTCCCAAGATCG |
| | | | | | | 846 | |
| | | | | | 2038 | 48397 | CGATAACATTCCAACCAGACCGTGCTTTTCAAATGCCCCCGAAAATAGCG |
| | | | | | | 225 | |
| | | | | | 2039 | 13959 | CGGGTCTGCCTGAGGATAGGCATCCTCCATACCTGGCAAGCAGCAAGCGG |
| | | | | | | 3443 | |
| | | | | | 2040 | 20865 | TTTCCTTTAAAATTGCATTTTCTGCAGAACTCAAAATCTAGACTGGGTCG |
| | | | | | | 674 | |
| | | | | | 2041 | 14266 | CCGATGCAGGCTCAGATATGCTGCCTGCGGGATGTCGTGCTTTCCAGGCG |
| | | | | | | 6476 | |
| | | | | | 2042 | 67070 | GTAGAAGAAAGCGCCTCATTCTTTTCCAGGCATATAAGGACGAACCCACG |
| | | | | | | 120 | |
| | | | | | 2043 | 59612 | CGACTTCTTTCTACAGTTACTAAGCGCCCACTGTGTGCCCTGGAAGGGAC |
| | | | | | | 408 | |
| | | | | | 2044 | 18771 | TTCAGAGGCCTTATAGCCTCGGCGAAGCATGCTGGGTGCGGGCGGAGGCG |
| | | | | | | 3876 | |
| | | | | | 2045 | 58145 | GTGGCTTTACTGAGGCGACTGGAGGCTTTTGAGCATCCCAATGTTGTCCG |
| | | | | | | 283 | |
| | | | | | 2046 | 12404 | CGAGGGACTGTTAACCATGACCGTCCTCATAGATTAAATTAGGTACTTGC |
| | | | | | | 3067 | |
| | | | | | 2047 | 22370 | CGCCGCGACAGAGGGGAAGCAATTGTACCCTAAAGTCTACACTGTCTGTC |
| | | | | | | 046 | |
| | | | | | 2048 | 38067 | CAAGTGGGGGATCCGCGGCAGTGAGGACTGTAGGGTGCGCGGGTACTCCG |
| | | | | | | 622 | |
| | | | | | 2049 | 28129 | TGAGGTAGGAAGTCTGAGCATTGCCGACGGGCCGGAGCAAATCGCTCCCG |
| | | | | | | 416 | |
| | | | | | 2050 | 81106 | GGTTGTGATTAATTTTTCCGAGGGGATTTGGGCCGGGAGCTTACGGAACG |
| | | | | | | 312 | |
| | | | | | 2051 | 36728 | CGCCCCCCGCCCAACCCGAGGCGGCGATCCCGGCCCCCACAGTCGCTCCC |
| | | | | | | 859 | |
| | | | | | 2052 | 50444 | AGTGCCGGTGAATAATTCATGGGGCTGGGAGGCCCTTATCTCCCTGGCCG |
| | | | | | | 723 | |
| | | | | | 2053 | 19499 | CGCTGCCAGAGTATTTGTGGGAAGAGAAAGAGGAGGTTGGATGAATCACT |
| | | | | | | 118 | |
| | | | | | 2054 | 11637 | CGCTCCCCCCACGAGCCGCCGCACTCCCTAAATGAATGAACTGGCTGCTC |
| | | | | | | 1330 | |
| | | | | | 2055 | 14541 | CGGCCTCTGTCGAGCCCTCCGCTCCTATGCGCTCTGCACTCGGCGCACCG |
| | | | | | | 5412 | |
| | | | | | 2056 | 42145 | CGTCTCTTGGGGCTTGCCGAGATGGGCGGAGCCTTGGGTTATGATGGGCG |
| | | | | | | 954 | |
| | | | | | 2057 | 30405 | ACTGACTGGTTGCATCTTGGCCAACTGCTCCTAGGCAGGGCTGCATTTCG |
| | | | | | | 328 | |
| | | | | | 2058 | 48144 | CGGGGACCTTCGCGAGTTACTTTGTAAAGGCGAATCCAGGCAAGAGAGCC |
| | | | | | | 369 | |
| | | | | | 2059 | 20512 | CGGCCTCCGCCCTCCTGGCCCAGCGGCCCCCACCCGACCCCACCCGACCC |
| | | | | | | 463 | |
| | | | | | 2060 | 10848 | ATGCTTAAATTTCCACTGTTGGACGAATTCTGAGCGCCCAGGGAGCAGCG |
| | | | | | | 7820 | |
| | | | | | 2061 | 11840 | CGCCCTCCGGCACACACTGCTGCTCCTGCCAGCCCTTCTGAGCTCAGGTA |
| | | | | | | 2540 | |
| | | | | | 2062 | 10542 | AGGGAGGATCGTGTGGGATTCTCTGTGCTCCGAAGGAGTCCTGCATTTCG |
| | | | | | | 8651 | |
| | | | | | 2063 | 20134 | CGCTCGAGGACCTTTGCCCTGGGCCGCCGGGCCCGCCCCCCCACAGGAAC |
| | | | | | | 778 | |
| | | | | | 2064 | 13273 | GCTGACCACCAGGAATAAACAGATTCCTGGCAATAGCCATTATTAGATCG |
| | | | | | | 5814 | |
| | | | | | 2065 | 17444 | CGAAGGGCCCCGAAGGCAACCCGGTGGGTAGGGGCGCGGCGGACAGGAC |
| | | | | | | 0103 | G |
| | | | | | 2066 | 13546 | GACCTCTGGGGCCCCGGGAACAGGACATGAACCCTGAGGGGAACAGGACG |
| | | | | | | 2522 | |
| | | | | | 2067 | 46951 | CAGGAGATGGCTCGTGGCAAATTGCTTTGTTAGTCTTGTCAGCGCGGCCG |
| | | | | | | 354 | |
| | | | | | 2068 | 50892 | GAGGCATTGACTTTTGCGCTGTTTGCCCGCGGCCTCGGAGCAAGCAGACG |
| | | | | | | 674 | |
| | | | | | 2069 | 91184 | TACACTCCAACGAGGCGTTACAGTCATGCTCCGGGTCCCAAGTGGATCCG |
| | | | | | | 501 | |
| | | | | | 2070 | 50373 | CGCCAAAATCTTAGCCCAGAGCTTGGGTGCAAGGGTTGAGTTGAGTGTAG |
| | | | | | | 641 | |
| | | | | | 2071 | 11930 | AACAAATAATTTAAAAATAAATCTCCATGAAAACTCTGGAGAGCAGCCCG |
| | | | | | | 4705 | |
| | | | | | 2072 | 26273 | CGAAGTGATACCGTCAAATGACCACAGGAAAATGCTGGTGAGCCCAAACG |
| | | | | | | 145 | |
| | | | | | 2073 | 13663 | GCGGGATGAGCTGCTTTCCAAAAAGGATCTCGGTGATTGGACCGAGCTCG |
| | | | | | | 2433 | |
| | | | | | 2074 | 54609 | TGGCTCGGCGGATCAGATCGCTCGGTGCCGAGGAGGACAATACAGTGACG |
| | | | | | | 776 | |
| | | | | | 2075 | 95239 | CGCAAATTGTCCACCTCGTGTTGCTAAGCGATTGTTTGTCGGCCCCGCAC |
| | | | | | | 570 | |
| | | | | | 2076 | 73846 | CGGGCCCATCCCCCACAGCACCCCCAACGATCTCGGGGTCCAGCCACACC |
| | | | | | | 858 | |
| | | | | | 2077 | 11513 | CGCGCCCCAAGAGCCTCTGCCAGGCCGCTGGGACTTGATTCATTTCTTGA |
| | | | | | | 6200 | |
| | | | | | 2078 | 26047 | CAGCCTGTAGAAATCCGTGCTTTGCTTCCTGCACGGCGGGTAGAGCAGCG |
| | | | | | | 996 | |
| | | | | | 2079 | 28998 | CGGACGCAGCCCGCGTGCTCCCCGAGCTATTGCACTGGAGCCGCCCTCCC |
| | | | | | | 195 | |
| | | | | | 2080 | 15112 | CGGCTTTGCAACAGGCATTACTCGCCATTGATTGGTGCCCACCCAGGGCA |
| | | | | | | 2266 | |
| | | | | | 2081 | 10091 | GGCCGAGGCCGCGGCTGTCGGGGTGGCCTGGACGGGTGCAGGGCTGGGCG |
| | | | | | | 3842 | |
| | | | | | 2082 | 48546 | AGAGCGGGGGGCTACAGCCGGGGCTCAGGGCTCGGGGCTCGGGGGCCACG |
| | | | | | | 431 | |
| | | | | | 2083 | 88877 | TCTCCCGATCCAACTCACGAGAGATAAAGATGTCTAAATAACCACGACCG |
| | | | | | | 216 | |
| | | | | | 2084 | 12230 | CGCGGGAGCAGTTCATCGCTCTGTACCGGCTGCGACCGCTCGTCTACACC |
| | | | | | | 1740 | |
| | | | | | 2085 | 33718 | AACCCTGGCAAGCCACAGCTTCCTGCAGTGTCCTGTTGCCATGGGTTACG |
| | | | | | | 76 | |
| | | | | | 2086 | 38807 | TAAAATCCGCCTGCCCGCAGTGAGTGGGAACTGCTGCAGATCATTAAACG |
| | | | | | | 712 | |
| | | | | | 2087 | 24641 | CGGAGCCCATTGGTCGGAACACCTCACAATGGACCCCAGCGGCGCGCAAA |
| | | | | | | 077 | |
| | | | | | 2088 | 55610 | CGGCCCACTCCTCTTGTTAAAAGTAAAACCAGGCCGGGCGCGGTGGCTCA |
| | | | | | | 624 | |
| | | | | | 2089 | 20849 | CCTCGAAGCCACAGGCCCCACCTTCCGATGGAAGATTAATCTGGAGGCCG |
| | | | | | | 2057 | |
| | | | | | 2090 | 36978 | GCCATTTGAGCGTGTTTCAGCCAGATAATTACGTTGCCATTGTGTTACCG |
| | | | | | | 633 | |
| | | | | | 2091 | 16283 | CGCTTTTCAGCTCCTCAGGTGATAACAGAAGCCAAACTCCAAGATAGTGG |
| | | | | | | 1837 | |
| | | | | | 2092 | 91192 | TCACTCCATGCCATGAGAGAGAACCTGGCAGTGTCAGATTCACTCCAGCG |
| | | | | | | 803 | |
| | | | | | 2093 | 12721 | CCTGGCACAAAGGGCCACGGGCGCGAGGGACTCGATGAGCTGGGAGATCG |
| | | | | | | 1421 | |
| | | | | | 2094 | 10068 | CGTGGTTGCGTAAGCACATCTAAAGGTTAAACTCCAAGCAGCTAATCTGC |
| | | | | | | 6693 | |
| | | | | | 2095 | 62356 | CGCATATCCGCATCCACGCGGGCTACAAGCCCTTCGTCTGCGAATTTTGC |
| | | | | | | 962 | |
| | | | | | 2096 | 51138 | AGCCATGAACATAAATCCGGCCAAGTCGTGGCCCCGCAGCGTGGGCTGCG |
| | | | | | | 790 | |
| | | | | | 2097 | 29186 | AGCGCTGACTTGATGCGGCCAGGTTTCTGGGACCAGGAGGTTGGGACACG |
| | | | | | | 234 | |
| | | | | | 2098 | 67070 | CGGCCAGGTTTCAAGGGCTTTTCTTGGGTAGAAGAAAGCGCCTCATTCTT |
| | | | | | | 045 | |
| | | | | | 2099 | 53092 | CGCCTTCTAAAGCCTCGCCCAGCGCCGCCGAAGCAGCTTCACCTCTCCAA |
| | | | | | | 334 | |
| | | | | | 2100 | 10289 | CGCCCCCCTCCCAGAGGCGTCCCGCACCTGTCTGAACTGTTAAGAAATCT |
| | | | | | | 6869 | |
| | | | | | 2101 | 13972 | AATTACACTTTACCGTAGTCTCTATCAAATGGGAGCCCAGAGGAACTCCG |
| | | | | | | 099 | |
| | | | | | 2102 | 13536 | TGTTTCGGAAAGTCCAGGTTTTCCTCGGGGAGGACTTCAAACTCACTGCG |
| | | | | | | 910 | |
| | | | | | 2103 | 11840 | CGGATCCTGGAGTAGAGACGAACGGTTCCTGAAGCTCCCGGTAAATGCCC |
| | | | | | | 7296 | |
| | | | | | 2104 | 35395 | ACAGGGAAGGTGCCTGGGGAGGGGCCGGGCGGTGCTGTCTCCTGACTCCG |
| | | | | | | 800 | |
| | | | | | 2105 | 21022 | ACTTAGGGGTTCAAATGCTGCATTACCGCGCTCGGGTGAGCGACTGCCCG |
| | | | | | | 587 | |
| | | | | | 2106 | 15880 | CGCTAACAAGCATTGGAATCGCAGGCTCAGAGCCAGATGGCCTTAGAGAC |
| | | | | | | 0888 | |
| | | | | | 2107 | 28367 | AGGGATTTCCCTGTCTTAAGATCAGTTCTACAAGCCTCGACCACCCATCG |
| | | | | | | 749 | |
| | | | | | 2108 | 43423 | CGCCACCCCGCTCAGTCTCAGCGGGACACCTCCACAGCCAGTAGGAAGGG |
| | | | | | | 072 | |
| | | | | | 2109 | 72897 | GCGAAAAGTAGCTGGAGCCGGAGCAGGGACAGAACCTGTTGCTGCAGACG |
| | | | | | | 868 | |
| | | | | | 2110 | 86048 | CGGCCGTCCACGCAGGAACCGCAGTACTTGGGCCGGTATTTCTTCACACT |
| | | | | | | 540 | |
| | | | | | 2111 | 10844 | CGGGGCCACTTTGACCGCCAATAGTGGGGAAGTCAGAGCTAATCCTCAGA |
| | | | | | | 0280 | |
| | | | | | 2112 | 54422 | AGCAGGTTCTGCGGTAGAGAGCGCAGTCCTGCTGGCCTCTGGAGAGTGCG |
| | | | | | | 775 | |
| | | | | | 2113 | 39170 | CGGGAATCTGAGCCGTGCCAATCGACGTGGGGAAAATTTCACAGCTGCTG |
| | | | | | | 763 | |
| | | | | | 2114 | 13356 | CGTGAAATAAAAACCAACCCAGACCAGACTGGGGCGCTTTTTCTGACGGG |
| | | | | | | 1932 | |
| | | | | | 2115 | 39015 | CGCCGGGGTGCGCTCCAGGCTTGGCTGCAAACCCCCCAAGAATTAGAAAG |
| | | | | | | 705 | |
| | | | | | 2116 | 54391 | CACTTGGGCGGCTGCTGGCAGCGATGAGCAGAGACGTTTAGCCCTCAGCG |
| | | | | | | 631 | |
| | | | | | 2117 | 16986 | CTAACCACTCTGCCTAAGCAGCTATGACAGTGCATCCCACAGTTAAAACG |
| | | | | | | 186 | |
| | | | | | 2118 | 58216 | GGGCCTTGAAAGCGAACTCAGGAGATGGGGCGTTGTGTATAGGCAAGTCG |
| | | | | | | 297 | |
| | | | | | 2119 | 97646 | CGGGACCTCTGGACATCCTCCATCCCGGTTTGGCGGGAAACTGACCCAGG |
| | | | | | | 778 | |
| | | | | | 2120 | 47703 | CGACAGGACCATTCTGGAGAACCATTTTGGCAAAATTGCTAAAGTGCAGC |
| | | | | | | 630 | |
| | | | | | 2121 | 49736 | AGTTGGTTATGATGTTTTTTCCCCTACTCAGCTCTAAAAAAACATCCTCG |
| | | | | | | 085 | |
| | | | | | 2122 | 26190 | CTTCCTCGCCTGCGGGTGGTGCGTTGGGAAGGCATGGGGTGCGGAACCCG |
| | | | | | | 347 | |
| | | | | | 2123 | 47717 | GGGCCTCTTCGGAGGGAGCTGAGGGCCGCGTTCCTTCTGAAAGCGGGACG |
| | | | | | | 575 | |
| | | | | | 2124 | 25055 | CCATGGGGAGGCTGCGGGGACGCGGGGCTGCAGAGAGCGGCAGTGGCAC |
| | | | | | | 967 | G |
| | | | | | 2125 | 26527 | CGACCCGCTCGTCGACGAGCGCCTGTTCAACACCTCTGACTCCTGCTCCT |
| | | | | | | 928 | |
| | | | | | 2126 | 20212 | CGCCGGACTGGGTAAAGCCAGCCCTGTAGCTGAAATGTAGGTAGATTGTT |
| | | | | | | 2474 | |
| | | | | | 2127 | 84763 | CGGACTTCCTTGAAATGACAAACAAGTAAATATTTAAGGGAATAAGTAAA |
| | | | | | | 338 | |
| | | | | | 2128 | 17828 | TAGTTTGACAAGTAAGATACCACAAGTCTGTCTGTCACTAAGAGCAAACG |
| | | | | | | 8359 | |
| | | | | | 2129 | 10710 | CGCGGTCCCCAACACCAGACTCCCGCAGCCACCGCGCCCGGTCCCGCCCT |
| | | | | | | 3716 | |
| | | | | | 2130 | 15079 | ATAAAGCACATTCAGAGACTGGCTAGAAGTCTTAAGCTTGGTCGTGCACG |
| | | | | | | 7951 | |
| | | | | | 2131 | 17013 | GCAGGTGGTGGGCTTCGTCACGAGCTTCGTGGGCTGGATCGGGGTCATCG |
| | | | | | | 6920 | |
| | | | | | 2132 | 68178 | CGAAAACAATTCCTCATGAGGAGTGAGCTGAGAGCAGAAATCCAGTGGAT |
| | | | | | | 729 | |
| | | | | | 2133 | 19692 | TCATTCAGCCTTAGGGGGGCATTTCTGCATTCTTTTCCAACAAGATGACG |
| | | | | | | 011 | |
| | | | | | 2134 | 31496 | TCTACGGGCTCGGCAAGAGGTGACGTAAGCGGAATGGGCTCCCAGGAGCG |
| | | | | | | 73 | |
| | | | | | 2135 | 37321 | CGCCCCGGGCCTTTCAGACACTTTTCTGGAATGTGAAGGGAGGTGGGGGC |
| | | | | | | 631 | |
| | | | | | 2136 | 79710 | TACAATTACGTGCAGTACATCATAAAATTCCAACAATATGTAACTCTTCG |
| | | | | | | 803 | |
| | | | | | 2137 | 57090 | CGCGCACACCCGCGCAGCGCGCACAGCCCCCTGGTGCAGCTCCTGCCATT |
| | | | | | | 013 | |
| | | | | | 2138 | 31020 | AGGAGTGGAGACGAGTCAACGCCCCTTCGTACAGCAGTGAGGTTAGAACG |
| | | | | | | 973 | |
| | | | | | 2139 | 70151 | CGCAGTCTCAGGCCCCACGCAATCCTTTTGCAAAGCCAAGAAGTGTGTGT |
| | | | | | | 134 | |
| | | | | | 2140 | 46526 | CGCAGGAGGAGCTGACACTTCACACATTTGTCAAGATTACTGTCAGGCCC |
| | | | | | | 843 | |
| | | | | | 2141 | 12920 | CGCCTTCCATGGGCACGCGGCCCCAGGACGGCCCTCTATTAAAGGATCCT |
| | | | | | | 4206 | |
| | | | | | 2142 | 22873 | CGCCACCAACCGCCCGCGGAGCCAGACCTCCCAGCTCTGCGCCCCAGGAC |
| | | | | | | 6258 | |
| | | | | | 2143 | 74707 | ACGGGGGACCTGGCCGGAGTTGACAAGGGGCAACTTTGTACGTCCACCCG |
| | | | | | | 145 | |
| | | | | | 2144 | 15319 | TTATTTCCAACTCTTCCAAGATGCAGACTCCCTAATGGTGGGTCACATCG |
| | | | | | | 2843 | |
| | | | | | 2145 | 64883 | CGGCTCCACCACCCCAGGTGGGGGCATGTGCCCACTCATCCACCAGCACA |
| | | | | | | 528 | |
| | | | | | 2146 | 36919 | CGCAAATTCGTTAAATTATGATACAATAAGGCCAACCTCGAGGATCCTCG |
| | | | | | | 674 | |
| | | | | | 2147 | 14589 | CGCTCTAGCATGCGTCCGAGCTCTGTTGCTTTTTACAGCCGCCTGGTCCC |
| | | | | | | 5604 | |
| | | | | | 2148 | 12920 | CGGTCTCAGAGGGAAGGAGCGCTCTAGGAAAGGAGGATCCTTTAATAGAG |
| | | | | | | 4125 | |
| | | | | | 2149 | 19788 | CGCCAGGACCCGGCGGGTGTCATGTGTAGGGGGAAATCAAATAAAACATA |
| | | | | | | 7714 | |
| | | | | | 2150 | 14572 | CGCTGCGCCCTGCCGCAATCAGTGGACAGCCGAATACTTCATTCGTTTCT |
| | | | | | | 0024 | |
| | | | | | 2151 | 10547 | CGCCCTGAGTTGAGGTATCCACCCAGGCTTCGGAGTCATTGGAAGGGAAA |
| | | | | | | 9420 | |
| | | | | | 2152 | 83032 | GAGGTGCGCGCTCTGTACGAGGAGACGGAGCAGCTTCGGGAGCAGAGCCG |
| | | | | | | 0 | |
| | | | | | 2153 | 19692 | CAGAAATGCCCCCCTAAGGCTGAATGAGCACCACTTCCACACTCAGGGCG |
| | | | | | | 082 | |
| | | | | | 2154 | 15747 | CCGGTCTTGACTGGAAAAGCTGGTCATTAATTAGCCTCCTTTTGCCTTCG |
| | | | | | | 6887 | |
| | | | | | 2155 | 76859 | GGCGAGGTGGGCGGGGCGGGGCCTGAGGGGGCCTGGACGGGCACCGGGC |
| | | | | | | 010 | G |
| | | | | | 2156 | 15065 | GAGGGGGCCGCTGGCTGGGCACCGGCGGGGCGGGGGAGCCTAGTGTGGCG |
| | | | | | | 2948 | |
| | | | | | 2157 | 11220 | AGCAATGGAAGCAGCCGAGCGTGGCCTCGCCCATGGTGAACTGGAGAACG |
| | | | | | | 5368 | |
| | | | | | 2158 | 38035 | CGTCCAGCGACCTGCACTACTGGGTCGGGAAGCAGGCGGGTGCGGAAGCG |
| | | | | | | 831 | |
| | | | | | 2159 | 41875 | CGGCCACTGAAAGCCTCCCTGTTCCTGGGCAGGGCAGCCAGAGTGCCCTC |
| | | | | | | 606 | |
| | | | | | 2160 | 13100 | CGGACACCTGTAAGTGTGATTTACAAGACTGAGGGCAAATGCCAGGAGCC |
| | | | | | | 2896 | |
| | | | | | 2161 | 36979 | ACATAGGCATATCCAGTTCCTTAGACATTGACTGGGTCTCCTGGGTTGCG |
| | | | | | | 758 | |
| | | | | | 2162 | 11551 | GCTGGCGTGGCCCTCAGGGATCCTTTCTTTTCTTCCCCCAGAACATTGCG |
| | | | | | | 964 | |
| | | | | | 2163 | 10184 | CGCCACACACGGTCGGCTCTTCCGGCGCCAACATGACCCTGGCTTGTTCC |
| | | | | | | 584 | |
| | | | | | 2164 | 36991 | TGCTTAGCCACCACAGTGATCAATGCTCAGTTCGTCGGGGCCTGAGAGCG |
| | | | | | | 034 | |
| | | | | | 2165 | 60386 | CGGGGTTCGTCCCGGCTGTCACGCCACCTTGTGACATCACAGGGCCATGC |
| | | | | | | 396 | |
| | | | | | 2166 | 14710 | CGCTCGCCAGTAATAATATTTCATTACGCTGCTCCAGAGGCTTCCTGGAG |
| | | | | | | 9784 | |
| | | | | | 2167 | 20898 | CGTCCGCAGAGATACCTCTGTGCCCTGGGATTCCCTCATCCCGCTCAGGA |
| | | | | | | 781 | |
| | | | | | 2168 | 17357 | TTTTAATTTCCTTTTCTTTCTGTGCTTTGCAGAAAGGGCTTGGCCTGGCG |
| | | | | | | 587 | |
| | | | | | 2169 | 65409 | CGCGGGATCAGGACGTGGGTTGCCTCCCCGACACCTTGTATGCATCCTGA |
| | | | | | | 861 | |
| | | | | | 2170 | 18067 | CGCCTGCTCCCAGAGACTTGCACGCCTCAATCTCTGCGTGTATCTGACTG |
| | | | | | | 927 | |
| | | | | | 2171 | 67250 | CGGAAATGAGTCATAGTTGTGCCCAATTAATATTAGGGAATAATCGATGA |
| | | | | | | 046 | |
| | | | | | 2172 | 44340 | TCCCTGCCAGTCACAAGCCTCGGGATTATGCGATCAGAATGTGCGCTCCG |
| | | | | | | 839 | |
| | | | | | 2173 | 39649 | CGGGGCTCTCAAGCCCAGTAGGCTCCAATCCGTTGAGTTCCTGTTTTGAT |
| | | | | | | 254 | |
| | | | | | 2174 | 43276 | CAAGTGGAGTGGTTCTAAATTTCTGATAACCAATGAGCGCCGAGGAACCG |
| | | | | | | 647 | |
| | | | | | 2175 | 22032 | AAAGGCAGATCCCGCGGCTTGGGAGTGAGCAGAGTGGCTAAATCCAGACG |
| | | | | | | 5369 | |
| | | | | | 2176 | 17330 | ATGAATTCCCGGTGCTGATGTCCAGAAGAACAATTTCATAACCCTGTTCG |
| | | | | | | 2303 | |
| | | | | | 2177 | 64035 | CGGTAGTCAAGGGAAAATCCTGACTCAGGGTGTGGGGTTCATGAATGAGA |
| | | | | | | 529 | |
| | | | | | 2178 | 12645 | TGCCAGCCCAGAGTCCTTAGTCGGATAATGTATCACAGATACAACAGTCG |
| | | | | | | 0475 | |
| | | | | | 2179 | 46262 | GGAGCTCGGCCCCGCGCGGGGCAGAGGGAGTGGTCCAGGGCTCGGGAGCG |
| | | | | | | 436 | |
| | | | | | 2180 | 58216 | CAAGCGCGGCCTCGGAACCGAATGGACAAAGACGACGGGGGCTGGAGAC |
| | | | | | | 415 | G |
| | | | | | 2181 | 13839 | CGGTGGCAGCAGAGACAGGCAGAGCGCAGTTCCCGCCCACCCCTGCTCCC |
| | | | | | | 3651 | |
| | | | | | 2182 | 73163 | ATCTGGTGCATCTGCTCCCCACGAGCGCGGGCACCTGGGGCGAGAGAGCG |
| | | | | | | 868 | |
| | | | | | 2183 | 22929 | GGAAGAGGTTTGTCCTGGTACTTCGCTCAGCGTTACTTTCAAGAAAGCCG |
| | | | | | | 205 | |
| | | | | | 2184 | 27521 | CGGGTCAATTCAGAAACCAGCTCCCCTGGGGGCAAGTTTGGCTCTGTGCT |
| | | | | | | 385 | |
| | | | | | 2185 | 36044 | GCTGTCATCACTGATTGTTCTGAAACTGCTTTCCTCCACAGCATCTTACG |
| | | | | | | 151 | |
| | | | | | 2186 | 41363 | CGCTGCCAGCTCTTCAAACGTTACCCGAGGGCCCGGACGCTGCTTCCGCA |
| | | | | | | 774 | |
| | | | | | 2187 | 13929 | CATGTGACGAGATGAGACGTGGATGCTCCCCTGTCCTCGGCAGCCAGTCG |
| | | | | | | 0292 | |
| | | | | | 2188 | 60288 | AAGGTAGGCTGTCTTTTCTTCCCTCGCCGGCAGTAAAGGAAACCTTCTCG |
| | | | | | | 404 | |
| | | | | | 2189 | 38677 | CGTGCCCAAACCATTAGGAGATATCAATGTAGGCAAGCCTGAAGCTCACT |
| | | | | | | 095 | |
| | | | | | 2190 | 42620 | TTTTGCGTCTGGATTTCCTCCGTAGAGAGGCGCTGGGCCTGAGCCAAGCG |
| | | | | | | 091 | |
| | | | | | 2191 | 10061 | TGACCTTCCCTCTAAAAGGTAACACGTAGAGATTCCTAAAGGAACCATCG |
| | | | | | | 5670 | |
| | | | | | 2192 | 15955 | CGAGAGCACTTGAAAATGAAATGACTGTCTAAGAGATCTGGTCAAAGCAA |
| | | | | | | 8512 | |
| | | | | | 2193 | 14748 | CGGCCTCTGTCGGGAGAAATTCTGAGCAGAGCCGTTAGCTGCTCTAACGT |
| | | | | | | 230 | |
| | | | | | 2194 | 18831 | CGCAGAAGAGATTTACCCACAAGCAAGGTGGGAAAGAGTGAAAGCTTTGC |
| | | | | | | 2833 | |
| | | | | | 2195 | 53208 | ACAGCAAATGGAGCAGCAGAGTGCACACCACCAGACCCCGCTGGAGAACG |
| | | | | | | 752 | |
| | | | | | 2196 | 94083 | CTCAGCACCATAGCAGACAGGGTGGCAATACCATTACCAAAATAATACCG |
| | | | | | | 470 | |
| | | | | | 2197 | 14490 | CGGGCAGCTCGCCCGTCTTGAGCTCCCAGCAGAAATCGCAATCGCTTTAG |
| | | | | | | 3565 | |
| | | | | | 2198 | 22624 | GAATCTCAAGATCTGGGCAAAGGCTCGCGTCTCGGGACGCGAAGTCGACG |
| | | | | | | 094 | |
| | | | | | 2199 | 11953 | CGCCCGAGTCCTGCTTCCCACCCACCGGGGCAGGCGCTCACAGACTGTGT |
| | | | | | | 0677 | |
| | | | | | 2200 | 20359 | CGGGCTGTGCTCCTTTGACTTGACCTTGAATCTAGAGACTTGGTGGTAAA |
| | | | | | | 8954 | |
| | | | | | 2201 | 11711 | GGTGGAGAAAGCCGCTAGAGCAAATTTGGGGCCGGACCAGGCAGCACTCG |
| | | | | | | 9938 | |
| | | | | | 2202 | 65506 | TGTTAGAGATACTACTCACATCCCACTTCCACTTTATTACAGAGATTACG |
| | | | | | | 902 | |
| | | | | | 2203 | 46691 | AGGCCTGGCAGGCCGGGGCGCATTTCCTCCAGCTTCTGGAAGACTTGCCG |
| | | | | | | 543 | |
| | | | | | 2204 | 22094 | AGTGCACGAATGTCTCACAGGAGCAAGGCTGGCTCAAGTCTAATTTTCCG |
| | | | | | | 699 | |
| | | | | | 2205 | 19754 | CTGGGGCTGGGGGAACGTATTCCTTGCTTGCCCTTGGGGCAGGGTGGCCG |
| | | | | | | 448 | |
| | | | | | 2206 | 76540 | GGTGGCAGGAGGGCCGGCGGAGCGCCATGGCCTGCATCCTGAAGGTAACG |
| | | | | | | 574 | |
| | | | | | 2207 | 15110 | CGCCGGGAACTCATTTGGGGCGCAGCTCCACCGACCCCTCGGCTACTCGC |
| | | | | | | 7400 | |
| | | | | | 2208 | 53208 | CGGGGCAGCATGGGTACCCAGGGCTGAGAAAGACAGTCACGGTTTTCTTT |
| | | | | | | 709 | |
| | | | | | 2209 | 47730 | CGCCTGCCGGCAGGGATGGGGCTCCACGGGCACCACAGGGTTAACAGCCC |
| | | | | | | 821 | |
| | | | | | 2210 | 13865 | CGCCCACAGGCTGACCCTGCAACCTCTGGCCCGGTGGCTACCTTCTGCTT |
| | | | | | | 8704 | |
| | | | | | 2211 | 26600 | TCTATCACTTCATGCAACAGCCTGGAAAATGATCAGAATTTTGGTCTACG |
| | | | | | | 049 | |
| | | | | | 2212 | 12145 | TTGGTAACACCTGGGAGCTCGTTAGAAATGCAGAATCCAGGCTGGGCACG |
| | | | | | | 4837 | |
| | | | | | 2213 | 15039 | TGGGTGGGTTTAACTCAGCTAGCAGCTGCGGCGGTCTTGGCGCGCTCTCG |
| | | | | | | 6241 | |
| | | | | | 2214 | 17554 | TTCTTGCGGCTGCTGGCGGGGGGATCGGGTGGGGGTGTTCCCTCTGTTCG |
| | | | | | | 8020 | |
| | | | | | 2215 | 20184 | CGACGGACAGGAAACGGTGAAAACTACACCCCGGCAAATGCCCCAACAGG |
| | | | | | | 350 | |
| | | | | | 2216 | 17699 | CCAGGTCTTGAGGGGCGGGTCAGGGGCGTGACCAGAGCGGCCCGGAACCG |
| | | | | | | 740 | |
| | | | | | 2217 | 13484 | TCTGTCTCGGTGATGCTAGGGACTTTTCCTACTGAAATGACCTGAGCCCG |
| | | | | | | 7724 | |
| | | | | | 2218 | 50794 | GGGCTGTGGCCCTGAGTGTGGTGCATCTGGGTCACACAACAAAACCCTCG |
| | | | | | | 057 | |
| | | | | | 2219 | 85641 | CGGCGACCGGACCCCGAAGCGCACTACTTGCCTGCCAACGCCTTGCTCCG |
| | | | | | | 076 | |
| | | | | | 2220 | 26250 | CGCCCTGAATTATGTAGTGTGATAGGACTTGTGATCAGCTACTAGGTCTC |
| | | | | | | 936 | |
| | | | | | 2221 | 55444 | GCGGGGAGTGGGGCGTGGCAGGTGGCCGCGCCTGGGGCAGCGGGTGCACG |
| | | | | | | 061 | |
| | | | | | 2222 | 54345 | ATTTTTGTCCGAGCCCGGTTAAAAAACGGGTGCCTGAGTTGCGTGTGTCG |
| | | | | | | 862 | |
| | | | | | 2223 | 38067 | CGCTTGGCTGCCTCAGCTTACACTTCCCAGCAGGATCTGGCTGGGAGCCC |
| | | | | | | 742 | |
| | | | | | 2224 | 14249 | CGCTCTCCCAGCACCCAGAACCAGGAGTCCTCCGCCCAGACGCCCAGCAG |
| | | | | | | 4439 | |
| | | | | | 2225 | 13092 | TGGCCCCTGTCGAGTGCAGGGCCAAGGCTTGTGTTCAATCGTGTGAATCG |
| | | | | | | 9940 | |
| | | | | | 2226 | 89867 | CGGGCAACTTCCATTCTGTGGATCCCGCAGTAACCCGGACATAGTAGGTG |
| | | | | | | 704 | |
| | | | | | 2227 | 13910 | CGCGCTTCCCAAAACGAAGAGCAGAGCTGACACCTTCCACATCGTTCCCG |
| | | | | | | 569 | |
| | | | | | 2228 | 17696 | TTAAGGTCAAGTTAGTGTCTTATCTTGGGTGACTCAAAATCACCGCATCG |
| | | | | | | 9223 | |
| | | | | | 2229 | 23413 | CCAGCTCAGCATGTAGCAAGGACCACCGAGTGCCAGCCTGGTTCCCTACG |
| | | | | | | 37 | |
| | | | | | 2230 | 10912 | CTGGGCGCCAGGTGGGCTCCTGGGAGGGTGATGAAGCAGGTAGGGCCTCG |
| | | | | | | 331 | |
| | | | | | 2231 | 85424 | CGTACCTGGGAGTTAAGTGCGCTCCGAAGGGTGGCTTCTGAAAGGTCCAA |
| | | | | | | 469 | |
| | | | | | 2232 | 45792 | CTCCTGGCTGGGGTGGCGCTGCAGGGAGAACCGCGAGCTCTCAGGGGTCG |
| | | | | | | 660 | |
| | | | | | 2233 | 11138 | CGCCCTACCATGGCTGGGCGCAAGCGGCCCCCGAGGACACCCCCGGGCCC |
| | | | | | | 3576 | |
| | | | | | 2234 | 45404 | CGGGCATGGGGCGCCAATACGTGACAAACCGTCCGTATTGCGCCCTCCCC |
| | | | | | | 157 | |
| | | | | | 2235 | 92413 | CGCTCGGCCCCTCTGGAATAAAACACCCGCGAGCCCCGAGGGCCCAGAGG |
| | | | | | | 706 | |
| | | | | | 2236 | 17030 | CGTCGCCTCCAGCCCCGACCCCGGTAAGTGAACGGCCCCCTTCGCTGCCG |
| | | | | | | 3721 | |
| | | | | | 2237 | 13650 | AACCTTGGAGACCCTGGCCCGCACGCGGAGTGGCGTAGTGCTAGCTACCG |
| | | | | | | 9643 | |
| | | | | | 2238 | 68260 | CGCGAGTTCCACCAGTCGGGCTGCGTTTTGTGAACATGGAAACCAGATTT |
| | | | | | | 574 | |
| | | | | | 2239 | 15077 | CGGCCCTCCCTAGCCTGGCGCCTCAAGCTCGCCGCCCGGCTTCCCCGTGA |
| | | | | | | 562 | |
| | | | | | 2240 | 32015 | CGGCACCACCTGGAGCCGACCATCCTTATCCTTGTACTGGACCACGAAGG |
| | | | | | | 635 | |
| | | | | | 2241 | 45914 | ATGGAGCCGCCCTCTCCCCAGGACCACAGGGGCGCTTTCCAGTGAAGGCG |
| | | | | | | 525 | |
| | | | | | 2242 | 17513 | ACTTGGACAGAAAGATTCGAGGCAAATATTCTAGGCTGGGAAATTTCGCG |
| | | | | | | 8377 | |
| | | | | | 2243 | 32173 | CGGAAACACTTGGAAGCTGAACATCAGCCCGAGGACTCACTATGCTTCCC |
| | | | | | | 084 | |
| | | | | | 2244 | 12433 | AAAGCTTCCAACTGTTCCCTTCCCTGGGTGGCGGCAGCTGCCCAAGGTCG |
| | | | | | | 9995 | |
| | | | | | 2245 | 71702 | CGCCTGTGTGCCCACTCAATAGCAAGCCCAAAGCATGCATCCCAGAACAG |
| | | | | | | 722 | |
| | | | | | 2246 | 11207 | CGCACAGCCTGCCTAGCCCTAGCCCCGTACCCCTCGGGGGTATGCCCTCG |
| | | | | | | 3398 | |
| | | | | | 2247 | 27064 | TTCCCCCTCGAAGCGTTTCCACTCAGTTCTTGATCATTCATGTGAAAACG |
| | | | | | | 968 | |
| | | | | | 2248 | 49576 | TCTTACAGTGGCAGCTTGTTGCTCTTTGATGCCCTGAGAGGGCATTTCCG |
| | | | | | | 235 | |
| | | | | | 2249 | 56303 | AAGGAAGGCTTCGGTGACTCAGGTGAGCGCCTTTCTCTTCTTGGCAGCCG |
| | | | | | | 48 | |
| | | | | | 2250 | 12405 | ACATCAGTCTTTCCCCCGGGTCTGGATGGATCCATCTGTGATAGATCACG |
| | | | | | | 5251 | |
| | | | | | 2251 | 20185 | CGGCCAATCTTTCCAAAATGCGCTCTCACTCTGTTGGCTGCTCCGGCAGG |
| | | | | | | 382 | |
| | | | | | 2252 | 56534 | TTTTTGGTTTCTCTTCCTCATCTTCTTTGTTCTTTGATATTGCAGTCTCG |
| | | | | | | 05 | |
| | | | | | 2253 | 17068 | CGGAGTACTTGTAAGGTTACTGTTACTCCAAAATGTTTGTACCTACTATG |
| | | | | | | 5661 | |
| | | | | | 2254 | 22904 | GGGGCGGTGGTGCTGGGCCTGCTCCCCCAGCCGGGCAGGTGGCCTTTGCG |
| | | | | | | 5417 | |
| | | | | | 2255 | 15067 | CGGCCATGTCTTCCATCTCCAGAATCTTCCCAGCAATCAGGAACAGGATG |
| | | | | | | 457 | |
| | | | | | 2256 | 13952 | TAGTAAGGAGCCCACCCTTGGATCTTGGAGAGAGCTCCCTTTTAATATCG |
| | | | | | | 329 | |
| | | | | | 2257 | 75552 | CGGCTCTCACTAGCTCCGCAGCCCCGTCTATTTTTAGCTCGTGCCCACCC |
| | | | | | | 98 | |
| | | | | | 2258 | 26757 | TTTATGACAAGAAGACCTCTCGGCTTCTTGTAACTGGGGATTCAACCTCG |
| | | | | | | 644 | |
| | | | | | 2259 | 56484 | TGGCATAAACTGGCCACTTTCCTCCATCCTGGCATAAAATGGAGGCACCG |
| | | | | | | 117 | |
| | | | | | 2260 | 50791 | CCGAGTGGTAGTCCCTCCGGGGGTCAAGGCCCGAGAGCTGGGGCAAGGCG |
| | | | | | | 419 | |
| | | | | | 2261 | 10485 | CGCTGAGAAAGGCAACTCGGAGGCGTAGAAAATGGATTTCTGAGCCAACG |
| | | | | | | 2446 | |
| | | | | | 2262 | 97323 | CGGCCCCCTCCAGGAACCGCCTCCCCCGCCAGCCAAGACTCCATTGACCA |
| | | | | | | 948 | |
| | | | | | 2263 | 45451 | CGCCAGGACACCGCCTTTTGGACTGGGGCTGAATTCTGCCCCTTGAAGCT |
| | | | | | | 57 | |
| | | | | | 2264 | 39694 | CGGGCGCAGACCTGCCCTACCTGCCCTCCAACTGGGCCAACACCGCCTCC |
| | | | | | | 709 | |
| | | | | | 2265 | 22949 | CGAAGGCCAGTGGGAACCGTGAGGAGACGCACAACCTGGTTTGGGCCACG |
| | | | | | | 61 | |
| | | | | | 2266 | 10091 | GTTTTTCAACCCGAGTTTCCAATCCAGTGTTCATCTCCAGAGTTAGAACG |
| | | | | | | 7022 | |
| | | | | | 2267 | 13191 | CGTGCTAAAGATGGCACAGATGGGTTACATCCAGGCAAAACTTGGGCATT |
| | | | | | | 4037 | |
| | | | | | 2268 | 11112 | CGGGCCACCCCTGCCTCTGGGTCTCCTGATTCCTTGGCCTCGTCCCCTGC |
| | | | | | | 7346 | |
| | | | | | 2269 | 61822 | CGCCCAGGCCAGCTCAGGGTGTTCCCGTGGGGGTCTCCGGAAACAATGGT |
| | | | | | | 740 | |
| | | | | | 2270 | 18254 | CGCCATATGGTCTTCCCGGTCCAGCCAAGAGCCTGGAACCACGTGACCTG |
| | | | | | | 5492 | |
| | | | | | 2271 | 37123 | CAATATTCTAGAGGCCGCGGGGACGCCTGGTGGGTAGGGCTGCAGCTCCG |
| | | | | | | 638 | |
| | | | | | 2272 | 32223 | CGGCCTGGCGGTCCTACTCAACACCGCAAGATTTCAAAAGGGAAATTCCT |
| | | | | | | 090 | |
| | | | | | 2273 | 25058 | CGGCCATCACGCTGCTGCCGCCCCAGCGCTTCTCCCGCTTGCGCCATTTG |
| | | | | | | 429 | |
| | | | | | 2274 | 16169 | AAGGTCCACGTCGGGTTTCAGGGCTCCAGCCGATTGTTCCAAGGGCGTCG |
| | | | | | | 7241 | |
| | | | | | 2275 | 88877 | TTGGATCGGGAGAGGATCGCACGGTTTCCACCTGACGGAGCCACGTCACG |
| | | | | | | 301 | |
| | | | | | 2276 | 11067 | CCACGGGTCGCATCTTTCAGTGCCCAGATAGACTGAAGTGCGGCCAAGCG |
| | | | | | | 8956 | |
| | | | | | 2277 | 19789 | AGCTCAGCTGCGGTGGATACTCTCCTTGCAAGAGGGTCTCGAAGTGGGCG |
| | | | | | | 0608 | |
| | | | | | 2278 | 41712 | TAAAGACCCCCAAGCAGCACTGACAGTGAACTTGTGCTAAAGGTCTTTCG |
| | | | | | | 591 | |
| | | | | | 2279 | 13611 | CGCAGCCTGCCCTGAATTTTCTTCACACAGCCTGGGGGCATCCGAATGCA |
| | | | | | | 439 | |
| | | | | | 2280 | 68121 | CGCACTCCCGCCTTGGGAACCACAGGGTTCGTTGCTGGGAAGCTGTCTCG |
| | | | | | | 028 | |
| | | | | | 2281 | 13356 | GGGCCCCTTCCAGTGCTGCTGGGTGCAGGTATAGGCATCCGTCCCAGACG |
| | | | | | | 1756 | |
| | | | | | 2282 | 10044 | CGCGAGAGCAGAGATGCCTTCAGATTTTATTCGCGAAGGCACCCCACGCT |
| | | | | | | 2151 | |
| | | | | | 2283 | 11126 | ACTTCTGGAGTGTGTGTGTGCCAGGTGCGGGCGCGAGTGGCCGTGTGGCG |
| | | | | | | 79 | |
| | | | | | 2284 | 11513 | GGCGACATAGCTTCCAGTTAATTAGTCAAGAAATGAATCAAGTCCCAGCG |
| | | | | | | 6175 | |
| | | | | | 2285 | 13617 | CAAAGAGCAAAGGGCTCCGGGTTACGCTGCGGCGAACGATGCGGAAGACG |
| | | | | | | 091 | |
| | | | | | 2286 | 85472 | CGCCGCAGACGCTTATGGCTTAAGGAGGCCCAGGCTCTTGGGACCAGAGT |
| | | | | | | 949 | |
| | | | | | 2287 | 25962 | CGGGACAGAGAAGAATAGAAAGCTGACTCAGATGAATTTTGTGATGCCAA |
| | | | | | | 567 | |
| | | | | | 2288 | 55444 | CGGCATTTCTGTCGATTCCCGCAGGTGCCCCGTGCACCCGCTGCCCCAGG |
| | | | | | | 091 | |
| | | | | | 2289 | 12969 | TTATATCTGCGCCAGGCGGCGGCTCGAGTGAGGTCAGCGGGGAGGGGTCG |
| | | | | | | 3489 | |
| | | | | | 2290 | 85997 | TGGGGCTTTTTCCAAAACCAAGTCCCTTCCAGCCCTGCTTGTCCTCTTCG |
| | | | | | | 469 | |
| | | | | | 2291 | 47999 | CGCGGCGTGCATCACATTATTTCATTTCAAAGAATCCGCAGAGAAACCCG |
| | | | | | | 163 | |
| | | | | | 2292 | 89949 | CGGCCGCCCGCACATCTGGCCCCTAGACCTGCTCGGTAGAGGACTGGCTG |
| | | | | | | 776 | |
| | | | | | 2293 | 25506 | GGACCGTCGCCAGAAGGCGCCCAGAATTGGGTCCCTCCAGGTGGGGAGCG |
| | | | | | | 131 | |
| | | | | | 2294 | 32713 | GGAAACAACAGTCAGAGAAACCCCAAGAGCGGGCGAGCTAAGTGGCGAC |
| | | | | | | 112 | G |
| | | | | | 2295 | 42733 | CGGGCCAATCCCGAACACATTTACTTTGAGCGGGAAAAGCTCAGAAGCGG |
| | | | | | | 542 | |
| | | | | | 2296 | 42688 | CTGTGCCCGGGAGCTCTGAGGTCGCTGGCGGAGGGTGGACCCGTTCCCCG |
| | | | | | | 540 | |
| | | | | | 2297 | 86038 | CGCCGAGCCTCAGCTCACACACTCCGCAGACCCTCCTGCGCCCACACCCA |
| | | | | | | 802 | |
| | | | | | 2298 | 15358 | CGCGCAGTCAGAGCTGCCTCTCGCCCTCGCTAGCTGGGCTCGCAGCCTCT |
| | | | | | | 4416 | |
| | | | | | 2299 | 37571 | CGGCCCTGGGTGACAGACACAAGCTTCTGAACCCAAGCTAACAAAGGCGG |
| | | | | | | 677 | |
| | | | | | 2300 | 10274 | CGGGGTTGCTGGTCTCCTGGTCGCACCAAGAAGCATCGTTTGGGGTTCAG |
| | | | | | | 8988 | |
| | | | | | 2301 | 30037 | GGGGGGCCAACAGTTGTTATTTTCCCAAACCCGGGGATGCGGTGAGTGCG |
| | | | | | | 875 | |
| | | | | | 2302 | 11913 | CGCGGCCTGAGAAAGGTGGCACAGCAGCTTCCCGCCCACGCGCCTCTCTC |
| | | | | | | 3852 | |
| | | | | | 2303 | 75595 | GCGACCAAGAGTCTGTACGAGTGACTCGGTGTTTCTTTCCAGCCGGTTCG |
| | | | | | | 970 | |
| | | | | | 2304 | 50883 | CGCCCTGACTGAAGGGCCCGCAGCGGAAAACGCTGCTGCAGAGCAGCACT |
| | | | | | | 329 | |
| | | | | | 2305 | 60288 | CGCGGGGAAGCGGACGCGAAGGAAAACCTAAGTTCCTAACAACTATGGAA |
| | | | | | | 082 | |
| | | | | | 2306 | 14062 | CGCATGGTGGCGCTGCAGGCTAAGGCTTCAAAAAAAGGAAAAGGAAAAA |
| | | | | | | 4888 | G |
| | | | | | 2307 | 62305 | TATCTGTAATTTAGACCCCGGAGGGCGGGCCTGTGAGCGATTGCTGTCCG |
| | | | | | | 147 | |
| | | | | | 2308 | 27787 | TACAAATACAGAGGGCGGCCCAGCCACGAGGCCCAGCTGAGGGCACGGCG |
| | | | | | | 026 | |
| | | | | | 2309 | 24902 | GTGCCCAAGGGCCACAAGAGTATGACGGGGCTGTACGAGCTGCTGTGACG |
| | | | | | | 376 | |
| | | | | | 2310 | 10090 | CGGCCTCATTAGTATGCGCCTACGAGGGAAAATGAGACTTCCCCACAGGT |
| | | | | | | 3817 | |
| | | | | | 2311 | 11193 | GTAGGCGGGCGTCAGCGGCGCGGGCTTGCTGTCTGCGTGCTTGCTGGACG |
| | | | | | | 5508 | |
| | | | | | 2312 | 15640 | CGCGTGGCCCCCACCCACTCAGCTCCCAGCGCGGAGTCCCGGGACCACCT |
| | | | | | | 0281 | |
| | | | | | 2313 | 10280 | TCAAAGACTTTCAAGCCACTTCCTAGTGTGATGTCACATTCCTTCCTACG |
| | | | | | | 3407 | |
| | | | | | 2314 | 23822 | CGAGAGCACCTGTAGTTGGGATTTTTTTCATTGCAAAGGCATCGATTTTA |
| | | | | | | 666 | |
| | | | | | 2315 | 10257 | AGCCAGAATAGATGCCCGGAGACTCCGGAGTCCGCTGTTCAGGCGCTGCG |
| | | | | | | 2229 | |
| | | | | | 2316 | 72298 | CCAGAGGCTAAAAAGCTCAGCTGGAAAGCTACAGTGGGGCGGTGCCAGCG |
| | | | | | | 424 | |
| | | | | | 2317 | 13651 | CTGGGCACTTAGTGTCCAGTTTCCACCCAGAACAAGGTGGCATTCTGGCG |
| | | | | | | 0760 | |
| | | | | | 2318 | 38965 | TCCAGCAACACAAAGCGAAAAGTTAGTGGAGGACTACGAGCGCGATCTCG |
| | | | | | | 026 | |
| | | | | | 2319 | 11328 | CTTGCGAGAAGACCCCTCCCAGCCCAACCAGGGTTAGGGACGGGTGACCG |
| | | | | | | 6757 | |
| | | | | | 2320 | 99277 | AAGCTCTTGCTAGAGCTCCTGGCTTCTCTCATCCTCTGGAGCAATTTTCG |
| | | | | | | 015 | |
| | | | | | 2321 | 13356 | CGCGCAAAACTTCCATCCTGTCCACGTGAAGTTGTCGCTGCCTTAGAGAG |
| | | | | | | 2492 | |
| | | | | | 2322 | 13532 | AAGCATTTGAATGGACCTCAGCCCTAGGACCCTGGCGCCCTCGGAAACCG |
| | | | | | | 951 | |
| | | | | | 2323 | 29886 | CGCCCCGCCCGACCTCGGGTCGCGGGCTCCAAACCCAGCCCTCCAAGGGT |
| | | | | | | 890 | |
| | | | | | 2324 | 81107 | TAATGGAGGGTCGGGCCAATAAATTAGCTTTAGGAACAGACGGACGGACG |
| | | | | | | 087 | |
| | | | | | 2325 | 22959 | CTCAGGCATGCCTGGCCCAAAGCAGGGGTGCAGGCAGCTTAGGGATGACG |
| | | | | | | 875 | |
| | | | | | 2326 | 15319 | TTGTGTGATGGCTCATGACCTCCGGGCTGAGTGGCTTGGTCTCCCCCTCG |
| | | | | | | 9588 | |
| | | | | | 2327 | 18254 | CGCCCTGCAGCTAGCGCTTTTGTACAAGGTGGAAATTTAGCGGTGGGCCA |
| | | | | | | 4321 | |
| | | | | | 2328 | 13702 | CGGGGAACCTGATCCTGCCTTTGACTCAATTACGCCCTGACAGGGAGGGA |
| | | | | | | 8410 | |
| | | | | | 2329 | 42543 | GTCACCCGGGAGCAGGGAACACCAAGGAACCCAGAGTCGGGCCTCTTTCG |
| | | | | | | 530 | |
| | | | | | 2330 | 14937 | CTCCCTGCTTCCAGCTCTCCATATCTGTGAAATAACCGTGGAAGGACACG |
| | | | | | | 4535 | |
| | | | | | 2331 | 14030 | CCGGGCTTGCTAGGCTGGAGGCTGGGCAGCCGTCTGGGAAAGCGGAGCCG |
| | | | | | | 6231 | |
| | | | | | 2332 | 13382 | CGGCACTGGGAGGGCTGGTCATTTGTTTTTCAAGCTGTGGAGATTCCACA |
| | | | | | | 4178 | |
| | | | | | 2333 | 97646 | GCTGGTTTTTTGGAACCTCTGCAAACACTTTCTCCTGGGTCAGTTTCCCG |
| | | | | | | 811 | |
| | | | | | 2334 | 11334 | GAGGCTGGCGGTCACTGGTCAATCACAGGTTCGAGAAGTCGCATGCACCG |
| | | | | | | 5944 | |
| | | | | | 2335 | 62660 | CGCCGGGCCCCATGCACCCGGGCCAGCCTTACCTGGCGAAAAAGGAATCC |
| | | | | | | 624 | |
| | | | | | 2336 | 13160 | TCCACAGGAACCGCGGAGGACAGAGCATGCACATAGGTATGCCAACGGCG |
| | | | | | | 9432 | |
| | | | | | 2337 | 16216 | GAGTTGTGCAAAGCCTGGGAACAGTGAGGGCATTAGGACCAGGAGTGACG |
| | | | | | | 094 | |
| | | | | | 2338 | 84814 | CGCGCTCATCAGAAGTTTAAACAACAGCCACCAACCCGCGAGGGCAGGGC |
| | | | | | | 60 | |
| | | | | | 2339 | 59000 | CTACCCCCTCTGTCAGAAGTGTCACAGCTTTTCTGCCTTCGGATGTTTCG |
| | | | | | | 860 | |
| | | | | | 2340 | 13617 | CGGTGCTGCTTGTTCATGAAGACTTGTGCTGCAGAATCCAGCAACTTCAT |
| | | | | | | 3085 | |
| | | | | | 2341 | 14613 | GGTACACTGCAAAAGCGGCTTCAAGTCCCCTCCCCAGCTAATTACCTTCG |
| | | | | | | 6563 | |
| | | | | | 2342 | 50883 | CGCTCTGTTCCTGCTTCAGTGCGCACCTTGACGGCTCCTTAGGGACAGAC |
| | | | | | | 394 | |
| | | | | | 2343 | 23313 | CTGTACTGGTGAGCGCGATGCTTCGCCTAGGTGAACGGGACAGGTACACG |
| | | | | | | 293 | |
| | | | | | 2344 | 65360 | CGGCGCCACTCACCAGACTTGCCAGCCCCGCGGCGCCCCAGGATGGCCAG |
| | | | | | | 058 | |
| | | | | | 2345 | 20806 | CCGTGGCGGGGGCGCAGGGTGGGGGACCCCTAAGAAGTGCACAGTGCGCG |
| | | | | | | 732 | |
| | | | | | 2346 | 44063 | CGCAGCCCGGTGACCACCCCGAGGAGCGCGGCTCCGTTACTTACCCTGTC |
| | | | | | | 593 | |
| | | | | | 2347 | 12113 | GACTTTCTTTTCACGCGCGCGCCCAGAATGGACTGGGGACCTTTGGGACG |
| | | | | | | 7734 | |
| | | | | | 2348 | 16228 | CGCTTCTCCACGAGGTAAAGAGTTCTGCGGACTTCACTAGACGCAGCGCC |
| | | | | | | 3189 | |
| | | | | | 2349 | 14224 | GCTGGAGGTGAAACGGGCAGCCTGAGGCCTCCAGCTCACTTGGAGATACG |
| | | | | | | 7880 | |
| | | | | | 2350 | 24803 | CGGGGCTGGGGAGATCATGGCCCGCCTCTTCAGCCCCCGGCCGCCCCCCA |
| | | | | | | 873 | |
| | | | | | 2351 | 11900 | CGCAGTAAATTCCTAAAGGCTTGCAAGAGAAAGTGGGGAATAAAAAAGTC |
| | | | | | | 6837 | |
| | | | | | 2352 | 14712 | CGCGCAGTTGTTGAATAGACTTTGCGCTAGGCAAAGACAGGTTAATCGAG |
| | | | | | | 5712 | |
| | | | | | 2353 | 29235 | CTGGGCACCTCTCATTTCGGAAGGCCATCAGAGGCGCCCACTACTGAGCG |
| | | | | | | 123 | |
| | | | | | 2354 | 15262 | CGGGCAGCCCCACAGTGGGCGATTTTCCCGCACTCCGCACGAGTCCATCC |
| | | | | | | 3043 | |
| | | | | | 2355 | 15162 | CGTGAAATTGTCATTCTAGGGGTGATATATTACTACTTCATGGATTATCA |
| | | | | | | 821 | |
| | | | | | 2356 | 42074 | CGGAGCTGCGCTCCTCTGGAACAAAGCAGCCAGACGTGGCTTGAGTGGAT |
| | | | | | | 635 | |
| | | | | | 2357 | 22509 | GGGCGGCGGGAAGGGCACGGTGTCCAGCTGGCCGTGCGCAGGCAGCGGCG |
| | | | | | | 56 | |
| | | | | | 2358 | 10887 | TGCGGGGAGACCAGGCAGAATAGAAACCTCGGATCCCTAGCTAAATAGCG |
| | | | | | | 587 | |
| | | | | | 2359 | 22865 | CTAACTCCGTCAGAGCGCAGGCTTATAGAAGGCACTGTCTCCGAGCTGCG |
| | | | | | | 3136 | |
| | | | | | 2360 | 14081 | CGCAGCTGCTTGTAGTCAACGCTACCGACCCTGACGAAGGAGTCAATGCG |
| | | | | | | 1102 | |
| | | | | | 2361 | 91580 | CGCCCCAAACAAACAGTAAGTCAGAAGGGAACAGAGCACAGCACAGTCCC |
| | | | | | | 613 | |
| | | | | | 2362 | 10886 | GCAGCTCGAGCAACAGGCGGCTCAGAAGGGTTCGCAGCCGCTGGCTCTCG |
| | | | | | | 8237 | |
| | | | | | 2363 | 13164 | CGGGGACTTCTGGTCTCCTCTGTCAGGGGACAGGCAAATCGAGTGACTAG |
| | | | | | | 0135 | |
| | | | | | 2364 | 35991 | ACAATATCTACACTGGGTGAGTGCTTGGCCGGAGAATTCCCAGACAGGCG |
| | | | | | | 215 | |
| | | | | | 2365 | 66123 | CTGGGCGCGCAGGAGGTATAGGACTCTGGGATTTTTTGGCCAAAACTCCG |
| | | | | | | 127 | |
| | | | | | 2366 | 26687 | CGAACAAGGGAGTCTTGATTAGTACATTTGGGATTCTGGAGATGGCAGAA |
| | | | | | | 962 | |
| | | | | | 2367 | 16906 | CGGCTTTCCCGCCCCGAGGCCCCGCCGCAGGCTGCGCCCTCTGACCTGCA |
| | | | | | | 4530 | |
| | | | | | 2368 | 56415 | CGCAGACATGCATACACCACCCGCACTCCCTCGCCGTTTCCAAGGCGGCG |
| | | | | | | 271 | |
| | | | | | 2369 | 11513 | CGCCTAGGCGTCCAAGCTGTGTTCCCCACCGCGCCCCACTCCGCCCAAGG |
| | | | | | | 6287 | |
| | | | | | 2370 | 11708 | CGGGGCCCCCAGCAATTCTGGGCCCCAAGGTCACGGTGAGCCAGGGCTCC |
| | | | | | | 6601 | |
| | | | | | 2371 | 11421 | CTTCCAAAACAAGGCACAGCTTAGGAAAATCACTAGTTTTTACCATTACG |
| | | | | | | 4449 | |
| | | | | | 2372 | 66664 | CGGGTACTGATGCGAGTGCAGAGGAGGCCCGTGGTTCAGGTGGTGGACCG |
| | | | | | | 960 | |
| | | | | | 2373 | 10100 | CGCCACTGCCGCCTCCTCGGCCCCGGACCGCCGAGGGTTAACAAAAAAGC |
| | | | | | | 6035 | |
| | | | | | 2374 | 78173 | CGGAACTATCAACTGGGGACAAACCTGCGATCGCCACGGTCCTTCCGCCC |
| | | | | | | 227 | |
| | | | | | 2375 | 26674 | CCCTGAAGCCGCATTGGTGGGTCTCCATTTAGTTTGTCCTTTAAAGTCCG |
| | | | | | | 085 | |
| | | | | | 2376 | 72740 | CGCATCTGAAATTTAGATCTGAAAATAATTACGAAGAGAGCCAAGAACAA |
| | | | | | | 693 | |
| | | | | | 2377 | 14712 | GTCACCCTTGTCACAGTTATTGAAATTCCGCAACTCGCCACACCAGGACG |
| | | | | | | 5942 | |
| | | | | | 2378 | 12669 | CGCTTTGGTGGAACAAGTGATTACAGGAACAGTTCCGGCAATTTAGAGAC |
| | | | | | | 584 | |
| | | | | | 2379 | 25041 | CGCCCCTTGTCAAATCGCCTCCAGGGTCTCGGGGACCCGGTGAACAAAGC |
| | | | | | | 134 | |
| | | | | | 2380 | 18841 | CGCAATCTGATCTTACTAGCAGTGAAAGAGCGAGGTAAGAATTTGACTAT |
| | | | | | | 9087 | |
| | | | | | 2381 | 31938 | GACCCCTCTGGGGAGGTTAACACCAACGTGGCCTTCTGCTCTGTGCTACG |
| | | | | | | 533 | |
| | | | | | 2382 | 72530 | ACAATACTTTTTAACCCGATGGTTACCCCTCTGACTCCGATGACCTTTCG |
| | | | | | | 472 | |
| | | | | | 2383 | 11217 | CGCAGCTTTCAGACCTGCAGTCCATGTTAAAAGGATCTTGTTTCCAATTT |
| | | | | | | 38 | |
| | | | | | 2384 | 48565 | TTGGGGCCGGTCCTGGGTGGGAGGTGGGCTGCGGCGAAGCTGACTTTGCG |
| | | | | | | 189 | |
| | | | | | 2385 | 11803 | CGCTGCAGCCGAGGGGCGCGCCTGGCTGATGTGTGGTTGAATGGAGAGCG |
| | | | | | | 4031 | |
| | | | | | 2386 | 19184 | CGCCTGGCCATCGTCTATATCTCCTTCATGACCGAGCTCTTGGAGAGCTG |
| | | | | | | 555 | |
| | | | | | 2387 | 51841 | CGCCGTTCCTCCCACACGTGTCTGAGGTGTCAGTCGCCATGGGAACAGCC |
| | | | | | | 55 | |
| | | | | | 2388 | 10335 | CGGCTGAGCAGAGCTCCAATCTAGAAGTGTCCGGGGTTTTGTTAATTGTA |
| | | | | | | 9836 | |
| | | | | | 2389 | 44313 | CGCTTCTCACAGACCTTGATTCCTGAAATGATGCAGGAGCAGGGTCAATG |
| | | | | | | 578 | |
| | | | | | 2390 | 79470 | GGTCCTTTCGGGGACTGCGGCTGCTTCCCTGTTCGTAGACTCAGCAGCCG |
| | | | | | | 966 | |
| | | | | | 2391 | 81471 | CGGCGACTCTAGTGTGGCTTCCAAACTTCTGGGCTCTGGGCTCACTTCGG |
| | | | | | | 754 | |
| | | | | | 2392 | 70035 | TTCCCCATCAAGTCATAAAGCGAGCGGGTTGGGCGAGAGGGCACAGCTCG |
| | | | | | | 479 | |
| | | | | | 2393 | 23453 | CGCGGGTGCACCCGTGTCTCCTGGACACAGAGGCTGCCCTCTGATTGGGT |
| | | | | | | 98 | |
| | | | | | 2394 | 23453 | CGCCCCCGCGCCCCTTTGGAGTTCTGACCCCGCGGGTGCACCCGTGTCTC |
| | | | | | | 68 | |
| | | | | | 2395 | 16780 | CCCCAGAAGCCTGTTCCTGAGCTGATTGGGGTTCTGGGCCAGGGGTCTCG |
| | | | | | | 9876 | |
| | | | | | 2396 | 17330 | CGTTGTTTGATCATTTGTATTTCTTGCCTGATGGTCGGATTTACATGGAG |
| | | | | | | 2427 | |
| | | | | | 2397 | 13387 | CTCCTTCCTGTGCAGGTATCTCTGCTCTTTCGAGTACAGCAGGGGTGTCG |
| | | | | | | 1212 | |
| | | | | | 2398 | 22094 | CGCCCGCCCCAAGTCAAAGCTGAGCAGAGCAGGGATGGGGAAGGTCTCCG |
| | | | | | | 371 | |
| | | | | | 2399 | 11062 | TTTATTAAATGGTCCACACCTGAAAGTAATTGAGTCTCGGCGTGGGTGCG |
| | | | | | | 6540 | |
| | | | | | 2400 | 40618 | CAATGTATTCCTAAAAGGGGCCATCTGGGCGGTGTCCTCTTTTCCCAGCG |
| | | | | | | 284 | |
| | | | | | 2401 | 13974 | TCGGCCAAGGCCGAGCAGCACGGGAAGGTCGGGGAATCCTGGGAAGCTCG |
| | | | | | | 614 | |
| | | | | | 2402 | 10089 | ACACTAAAGATGAACAAAAACCAAGGCTGGCGCTCACTTGCGTTGACTCG |
| | | | | | | 5679 | |
| | | | | | 2403 | 13141 | CGAACTACAGAAGTATGAATTGACTCAAGGGGGCTGGCAGTGATTTATGT |
| | | | | | | 0868 | |
| | | | | | 2404 | 26223 | GTGTCGGGACAGCGCAGGGGACTGGCTTGGGGCGGCGGTGGGTAGCGGCG |
| | | | | | | 310 | |
| | | | | | 2405 | 38821 | TTTCCCATCCTCCACCTTGGCTAACTGAACCTTATCGATAGGATGAGTCG |
| | | | | | | 403 | |
| | | | | | 2406 | 47225 | CGCCACTCATGGACCAAGTCTCCGCCGATCCGTAACAGCGCTGTGTTCAG |
| | | | | | | 852 | |
| | | | | | 2407 | 61616 | AGAGATGTCTGAGCGGCGCCGGGTGTTAGTTCCCAGTGAATGGGGAGGCG |
| | | | | | | 526 | |
| | | | | | 2408 | 25056 | CGCGAGCATCCTTGTTTATTAAACAACCTCTAGGTGAATGGCCGGGAAGC |
| | | | | | | 243 | |
| | | | | | 2409 | 22873 | TTTTCTTGCTCTCTTATCCCCGGCCGATGGGCTTCGTAGCCTTGGAAACG |
| | | | | | | 6357 | |
| | | | | | 2410 | 10256 | CGGTCTTAACGTGGTTACCGGTGCACTGAAACTCTCAGCAGCGGTTGGAG |
| | | | | | | 9876 | |
| | | | | | 2411 | 99226 | CGGTACCCAAATGTCAGCTGACTGTGAATAGGAATATGAAACTGGAAATT |
| | | | | | | 761 | |
| | | | | | 2412 | 10485 | CGGGCCACGTTGGCTCAGAAATCCATTTTCTACGCCTCCGAGTTGCCTTT |
| | | | | | | 2439 | |
| | | | | | 2413 | 17299 | CGCCTATGAATGTCAAAGTTCTGCTAGGTTTCTCTGAAGCCTGCTTCTGC |
| | | | | | | 350 | |
| | | | | | 2414 | 11945 | CTAATCAAAGACACGTCAACCATCCCCCGGGTTGAAATAATGGGTGTTCG |
| | | | | | | 7146 | |
| | | | | | 2415 | 20212 | CTAAATGGAGTCAGTATAAATGCTTTCCAATAAAGCATGTCCAGCGCTCG |
| | | | | | | 2653 | |
| | | | | | 2416 | 21490 | CAGCAACAAGGGTGGGACGGAATCCGTTCCCCGCCGGAAAGATGGATGCG |
| | | | | | | 665 | |
| | | | | | 2417 | 11529 | GTTGCAGAGCTAAGAAAAACCATCCCGCCAGGCCCCTTCTTGTGGTAACG |
| | | | | | | 7488 | |
| | | | | | 2418 | 27433 | TTCTGAGAACAGATCTGTAGTTTTCTAAACACCCTACATTGATCCAAACG |
| | | | | | | 191 | |
| | | | | | 2419 | 75601 | GGCGAAAGCGGAGCTGTTCTGTTTAAACGCCCTTTGTGTGTGAGGACGCG |
| | | | | | | 120 | |
| | | | | | 2420 | 37123 | CGCCCTTGTTAGTTATTCATGAGACGGAGGGCACCATGGGAGCTGGCTCT |
| | | | | | | 909 | |
| | | | | | 2421 | 20134 | GGGGCACGGCGCAGAGCTGAGATAAACGCCCTTTCCCTGGCCCAGGATCG |
| | | | | | | 719 | |
| | | | | | 2422 | 83678 | CGCCCAAGAGTCCACAATTTTCTTGTGACTCAAATAGATGGATAGGTGCA |
| | | | | | | 796 | |
| | | | | | 2423 | 44333 | TACGTTCTCGCTTAACGATTTTCTCAGCGGTTTAAGGAAGGCTGCTCTCG |
| | | | | | | 192 | |
| | | | | | 2424 | 70682 | CGCGGGCATCGAGGATTCTCAGCTTTTGGCGTCCCAGTCCTGCCTCTGCT |
| | | | | | | 127 | |
| | | | | | 2425 | 18143 | CTGCTCTAATCCAGAGGGGCCCAATATTCCAGGGATCCCAGATTGCTCCG |
| | | | | | | 127 | |
| | | | | | 2426 | 11138 | CGCGGTTTCTCCAGATACAGTTAAACTGTTAGCTCTCTCTAGGAGTCACA |
| | | | | | | 3889 | |
| | | | | | 2427 | 88717 | CGGGGAGTTCCTGCGCTTCCCCAGGGCTTCCCAAACTTCAGCTCTCAAAC |
| | | | | | | 646 | |
| | | | | | 2428 | 46526 | GGAACTTGTGTATTTTACAACTGCGATGCCTATCGGGAATGTGGCAATCG |
| | | | | | | 785 | |
| | | | | | 2429 | 49087 | GTGAAAATCACCAGGAATACGTACTCCACCTGCTCCTGGGGGTGGGACCG |
| | | | | | | 465 | |
| | | | | | 2430 | 14748 | CGCCAAGCTCTTGAACACTCCGGCCTCTGTCGGGAGAAATTCTGAGCAGA |
| | | | | | | 250 | |
| | | | | | 2431 | 13310 | CGGCCACTTCCGTCGGTTGGAATTCTCTTAAGCATTGCCCTGAGTCTATT |
| | | | | | | 9029 | |
| | | | | | 2432 | 47572 | AAAGCCCATCTAGGGAATCTCTCATTTAGGATCCATGGTCATATGAATCG |
| | | | | | | 921 | |
| | | | | | 2433 | 22956 | CGAGACCACCTACAACAGCATCATGAAGTGTGACATCGACATCAGGAAGG |
| | | | | | | 7626 | |
| | | | | | 2434 | 11638 | CGGGGCGAGAAGTGCACCCCGCGTCTCCCCGCCCCCGTGAAAACCCAGAT |
| | | | | | | 1475 | |
| | | | | | 2435 | 13904 | CGCCTCCCAGACCTCTGGGGCCATGAATCATTTATGAGGCAAAAATGAAA |
| | | | | | | 7739 | |
| | | | | | 2436 | 15427 | CGATTCATTGGCCTGACCCTTTGAGCCCAGAGCAATGAAGTCTCCTGGGG |
| | | | | | | 69 | |
| | | | | | 2437 | 11051 | ACTTTCCACATTTTCCTCATGACTCAGGATCAGTTTCTGACTGCTGGGCG |
| | | | | | | 3817 | |
| | | | | | 2438 | 12197 | CTATAGAAGTGTAAAGACGAATAGCGTTCTGAACTCACCCATTCGAAGCG |
| | | | | | | 1092 | |
| | | | | | 2439 | 67218 | CGGAGGTCTGGGAGGCTCCGGGCGAAGCCTCCCTGCTGCAGGTAGGGTCG |
| | | | | | | 275 | |
| | | | | | 2440 | 10090 | GGGGCCTACGGAGGCCTTAAACCCCAAAGATTGGCGGGGACGAAGGGCCG |
| | | | | | | 3575 | |
| | | | | | 2441 | 79170 | CGTGGATTCGACTGTGCCGGGGAGAACCCGAGGTCAACGGCCTTAGGCCG |
| | | | | | | 283 | |
| | | | | | 2442 | 52156 | TAGAGGCTCCCCTTCCCCAGTGTGGGACTTAGCAGAGGGCGGGTCCAGCG |
| | | | | | | 170 | |
| | | | | | 2443 | 27772 | CGGCAACCATTTGTTCCTGGTGAGCCCCACCAAGGCCGGGCGCCTGGCTC |
| | | | | | | 44 | |
| | | | | | 2444 | 72756 | TGAAGCCCGACGGCCCTTCAACATGTCTGCGCAGGATAAGTGAGCTTTCG |
| | | | | | | 901 | |
| | | | | | 2445 | 13974 | GGGTCGGGGCGTCCCTGCGCACATTTAAAGGGGCCGTGGCCATGGGCACG |
| | | | | | | 286 | |
| | | | | | 2446 | 35479 | ATCCCTAGGGTGAGGAGCCCGAGGGGGTGCGCCCAGGCTTGGGGGTAGCG |
| | | | | | | 648 | |
| | | | | | 2447 | 17074 | CGCTTTCCTGCAGAATGTCATGTCACTGGCAAATGCCATGGAACCGCTCC |
| | | | | | | 6073 | |
| | | | | | 2448 | 64937 | CGGACATGATAAACAATCTGGAGAAATGGGAACCTTATTCACTTTGCTCC |
| | | | | | | 451 | |
| | | | | | 2449 | 10663 | CGGGTTTAGCTGAAGGCATTATGACTCCATGGCAACAGATGATTCCCTGA |
| | | | | | | 1934 | |
| | | | | | 2450 | 15371 | TTGGAGAAGCCCTTCTCCATTGTCTCAGTCACTTCAGGGTGCAGGAAGCG |
| | | | | | | 3930 | |
| | | | | | 2451 | 72520 | CGGGCTCTGCCAGTCTACACTTAAGCTCTTAAGGCAGTACAGAGAACCAG |
| | | | | | | 632 | |
| | | | | | 2452 | 73156 | CGTAGAGTTGCCACAGCAGCCGGTGCCATGACATCGGCAGAGGGCAGCTT |
| | | | | | | 377 | |
| | | | | | 2453 | 17991 | CAGGCACTTAGTGTCACCATACTAGGGGCGTGGCAATTCTCTCTCGTTCG |
| | | | | | | 4864 | |
| | | | | | 2454 | 91775 | TGTTTGTAGCTCAGGCACCCGGATGATTCATCCCATGAAAGCCTTGAGCG |
| | | | | | | 501 | |
| | | | | | 2455 | 10802 | CGAGCTCCTGCACTGCCAGAACGGAGGGACGTGCCACAACAACGTGCGCT |
| | | | | | | 3249 | |
| | | | | | 2456 | 18329 | CGGATATAGAAACTTCCACAACTGGGGGCCCTGGCTCTGACGACTTTCTT |
| | | | | | | 602 | |
| | | | | | 2457 | 10360 | GCCGGGCTGGGAAGACCTGAGGGATTAGACAGGGGTCCGGGCGGGGCTCG |
| | | | | | | 0846 | |
| | | | | | 2458 | 12426 | GGTCTACATTGTCACCATGGTAGGCAACCTTGGCTTGATCATTCTTTTCG |
| | | | | | | 7100 | |
| | | | | | 2459 | 40739 | ACATGGTTTGCATAGCTGGATCTCAGCTTATCTGTGCCTTTCGGCTTTCG |
| | | | | | | 661 | |
| | | | | | 2460 | 13779 | CGGGAGGGGGCTGCAAGGAGGCTGTCGCGCTGTTCCGGAGGGTGCCTGCG |
| | | | | | | 3853 | |
| | | | | | 2461 | 53919 | CAAGAATTTACATCCCACACTGAGTCATGCAGTAAGTTTAGTGCTTCCCG |
| | | | | | | 041 | |
| | | | | | 2462 | 54466 | CGCACCAGAGGCCCCGCTCTTCGTTCCAGCGCTTCAGCGACTCCAGTTTG |
| | | | | | | 441 | |
| | | | | | 2463 | 76834 | GGGCTGAGTTTGGTTGGGCAGGTGCTACGCGGAGCTCCTGAATGTAAGCG |
| | | | | | | 778 | |
| | | | | | 2464 | 23453 | GTCCAGGAGACACGGGTGCACCCGCGGGGTCAGAACTCCAAAGGGGCGCG |
| | | | | | | 74 | |
| | | | | | 2465 | 29186 | GTCCTCGTGACTGGGTGGGGCTGCCTCACTTCTGCCTGATTTGGGAAGCG |
| | | | | | | 110 | |
| | | | | | 2466 | 15814 | TCGCGAGCTCCATGTTCTCCTCTTTGGGACAAGTTGTTGAAATGGTTCCG |
| | | | | | | 3538 | |
| | | | | | 2467 | 10848 | TTACAGCCGGGCGCACAGAACACAGGATGCATATGCTGCGGGTGTGTGCG |
| | | | | | | 5102 | |
| | | | | | 2468 | 17513 | TCAAGGCCATGATTGCATCGCTCTCTGGAACGAAGATGGCCAGGAATTCG |
| | | | | | | 9486 | |
| | | | | | 2469 | 31070 | AGGAATAATGCTAATTAGCGAGGCTTAATGAGAACTTCCCCCAGGAAGCG |
| | | | | | | 190 | |
| | | | | | 2470 | 85667 | TGGAGGGAGCCATGAGCGACTGCCGTGCGGGACGTCTGGAATGAGGACCG |
| | | | | | | 353 | |
| | | | | | 2471 | 10304 | GGCCCCGGGCTTCCAGAGAAGTGTGTCATTATTTGTTTTCTGCAAAGCCG |
| | | | | | | 7225 | |
| | | | | | 2472 | 12457 | CGCACACCGTGCCCCACACGCCCTGGTGCCGCAGCTCTACCCGGCCCTCA |
| | | | | | | 8209 | |
| | | | | | 2473 | 80549 | ACGTAGACTTAATCCCGAGAGGCAATTGTTCCCTTGCTTGGGCGGCTACG |
| | | | | | | 634 | |
| | | | | | 2474 | 51522 | ACGGGAAGATGCCGCGAGGGGCGTCATTAGGGTAATTGTGCCCATTACCG |
| | | | | | | 561 | |
| | | | | | 2475 | 10053 | AGTGAGGTGTGTGTGACATATTCATGTGACCACCCGTGCAGCGTCACGCG |
| | | | | | | 98 | |
| | | | | | 2476 | 10009 | CGCCCGCGGCACAGCCCCACCCCGCGCTGCCGCTGCCTCTGCCCCTGCCG |
| | | | | | | 1255 | |
| | | | | | 2477 | 50602 | AATTGAGCTGCCCAGAATCCAGGGCGGAAGAGGCCCCTGCAGTGTTCTCG |
| | | | | | | 990 | |
| | | | | | 2478 | 20145 | TCACTGGCGCCCTCTATGTGGGCGGAAATCATCCGGCGAAGATGAAGACG |
| | | | | | | 0560 | |
| | | | | | 2479 | 17330 | TTACAAGACAACATGTGTGGCCAGCCACCCACTTCTACTGTCTCTATCCG |
| | | | | | | 3347 | |
| | | | | | 2480 | 11184 | CGGGGCTCCCCAGCACTCAGACCACTAGAGCCCTCCTCGTGATTCTGCCG |
| | | | | | | 7747 | |
| | | | | | 2481 | 39703 | CGGGAATCCCAAGTGAAGTTTAAGCCAATTGTTCAGGTTGTAGAGATGTC |
| | | | | | | 302 | |
| | | | | | 2482 | 11478 | ACATGACGGTCGGGCAGCTCACCCCAGACTCAGTGATGGCGTGGAAGACG |
| | | | | | | 0781 | |
| | | | | | 2483 | 13865 | CGAGGCGCTCCAGGCCGGGGTCTTCCCGGCTGCTGGCCCCTCTCGCTCCC |
| | | | | | | 8554 | |
| | | | | | 2484 | 13475 | CGCCGAGTGCAAAAGAGGCTGTTACTCGGAATTCGGCATGAATGTGGCCT |
| | | | | | | 4286 | |
| | | | | | 2485 | 27512 | TAAGATATTTGGAAACCTGTGTTCTGAGTTCTTCCTTTTCCCCGGGCTCG |
| | | | | | | 849 | |
| | | | | | 2486 | 13910 | CGCGCAGCTGCGTCTTTGGGACCTGGCACCGACTAAGCCGCTGCCTCTCC |
| | | | | | | 796 | |
| | | | | | 2487 | 46659 | CGAACAGCAACACGCATAATAGTAAAATAAGAGCAGGGGCTGCGCGCGAG |
| | | | | | | 318 | |
| | | | | | 2488 | 10249 | CGGGTTTGCGAAGGATGCGGGTTTTACTTAGTCTCGCTGAGCCTGTTCCG |
| | | | | | | 7666 | |
| | | | | | 2489 | 14712 | CGCTTGTTTTCGCGATGCGGCCCTCGATTAACCTGTCTTTGCCTAGCGCA |
| | | | | | | 5782 | |
| | | | | | 2490 | 12384 | GACTAACATATCATTTTTCCCTCTCTCCCCAGGGAGTACATGTTGTGCCG |
| | | | | | | 2309 | |
| | | | | | 2491 | 41746 | CGGCCCTGAAAGATGCCCTATCCATGAGATGCCTTTTCATCTGCAAACTC |
| | | | | | | 947 | |
| | | | | | 2492 | 72368 | CCTGGGCCTGGGGGCTTCAAGGAGATGCTCAGATTGACCCTTCCTGGTCG |
| | | | | | | 071 | |
| | | | | | 2493 | 31845 | TGACATATTGGGGCCTCGACAGCAAGGTTGGCCTCTGTCCCACAAGGACG |
| | | | | | | 389 | |
| | | | | | 2494 | 19295 | CGGTCAAAGCGCCGCGCAACCAGTTATTCCGCCCCCGGCTCCGCACCCGC |
| | | | | | | 8832 | |
| | | | | | 2495 | 38172 | TGAGCTCTCCAAAGCCCACTGCCAGTTCTCTTCGGGGACTAACTGCAACG |
| | | | | | | 876 | |
| | | | | | 2496 | 41882 | CGCCCTGCCGCGGAAACCCTTCCCGTGGCCTCGAACTGGTCCCCGACGAC |
| | | | | | | 163 | |
| | | | | | 2497 | 29974 | CAGTTCGTGCGGGTCGACAGTGACGCCGTGAGTCTGAGGATGAAGACGCG |
| | | | | | | 717 | |
| | | | | | 2498 | 29234 | GTATACTGAAGCCAGCTCTTGCCAACCCTGAGTGCTGCTGGAAAGCACCG |
| | | | | | | 671 | |
| | | | | | 2499 | 17759 | CGGCCCCGGCCCCACACCAGCCCTGGCCTCTTGTCTGGTTTAAATGATCG |
| | | | | | | 91 | |
| | | | | | 2500 | 12230 | CGCCGCTTCCCCGCACCCTCAGGGCGAGGGAAGACTTCCCTGGCTCACCA |
| | | | | | | 2265 | |
| | | | | | 2501 | 12331 | CGGGGTCGCTAAGCAATGCGGCACTCCCTGGCATCCATCAGCCGCGGCTT |
| | | | | | | 7875 | |
| | | | | | 2502 | 14753 | AGGACCTCAAATGTCTGCAGGTGTCCTCAAGGCTGGGGTTCATGGTGTCG |
| | | | | | | 722 | |
| | | | | | 2503 | 10333 | CAGGAGTGGGAGCCGCACGGCTTGGGGAACGCGGGAGATCGCGGATTGCG |
| | | | | | | 868 | |
| | | | | | 2504 | 60985 | CGCCCCATCCAGCCGCATCCCGGGACCCGGTCGCCAGGACCTCGCCGCTG |
| | | | | | | 732 | |
| | | | | | 2505 | 55107 | CGGCCCTCTCCTGGCAGCAAGCTCCCAGCGGCCAGTCTGAAGCCAATTCT |
| | | | | | | 755 | |
| | | | | | 2506 | 33402 | AGCAGGTGCCTCTCCGGGCGAGGCGCTATTGGCCGAGGGCTGGGGCGGCG |
| | | | | | | 512 | |
| | | | | | 2507 | 11708 | GAGCCTGTTTCAAACAGAGGCAGGCTGCTTCCTGAGGAACCAGCCCCTCG |
| | | | | | | 6941 | |
| | | | | | 2508 | 10289 | CGCCGGTTCTGGAACCAGGTTTTGACCTGCGCATCGGTCATTTTGAGCGC |
| | | | | | | 4120 | |
| | | | | | 2509 | 14263 | CGCAGGCCATGGGGAGCCCCGCTACCGTGAGCACCACCCACGCCGTCCCC |
| | | | | | | 2451 | |
| | | | | | 2510 | 17836 | GGGAGGTTAGTCCAGGGGAGCGACGCCCGATCGCTGACGAGAGAGGATCG |
| | | | | | | 7827 | |
| | | | | | 2511 | 24152 | ACAGTCACGTGGGACAGGGGCGTCCGAAGGTGCCGGCTCGGATGGGCTCG |
| | | | | | | 0598 | |
| | | | | | 2512 | 10111 | ACCTGAGCAGCGGTCACCACAGTAACGAATTCGCTGCCAGTGGAGTCTCG |
| | | | | | | 8525 | |
| | | | | | 2513 | 10834 | GTCCAAACCAAATTATCTCCCTGTGGTTCCTTGGGCTTCATCCGACAACG |
| | | | | | | 23 | |
| | | | | | 2514 | 14507 | CGCAGAAAGGACACAGTGACATGTAGTGTAAGTGACTGGCACCTTTCTGA |
| | | | | | | 8200 | |
| | | | | | 2515 | 10795 | ATTGCATCTTGCAACATTCGGAGCGTGGCCCCAGATACAGAGAACAGGCG |
| | | | | | | 6405 | |
| | | | | | 2516 | 84140 | GTGATCATAAGCCCATGGTGGGCAGAGGCCCTATGGAGCCAAGGGCTCCG |
| | | | | | | 997 | |
| | | | | | 2517 | 11953 | CGGTCCTAGCCAAGCTGAAAAAACGTCTCGGATTTCGCGGACAGCGGCCT |
| | | | | | | 2056 | |
| | | | | | 2518 | 91185 | CGCGCCAAAGGCATTTGATCCAACCCCGCTCCAGCCTACAGTGGCCCGAC |
| | | | | | | 422 | |
| | | | | | 2519 | 54723 | ATTTTTATTGCTGCCAGGGACCTCACCGGGGGCAGTGCTGGCACTGCTCG |
| | | | | | | 931 | |
| | | | | | 2520 | 27526 | CGATCTCGCCGTGGAGGCATGGATTCCAACCCTCCAGTGACGGTCGTATT |
| | | | | | | 023 | |
| | | | | | 2521 | 14034 | TCCAGATGAAAACCTACCTAATCCATCAAACAGTGTCTACTCTAAACACG |
| | | | | | | 2795 | |
| | | | | | 2522 | 14240 | TTTAATTTAAATTCAGAGTTAGCCGGAGCCATTTCCCCCCTCTAGAAGCG |
| | | | | | | 9993 | |
| | | | | | 2523 | 55370 | GAGCCCAGCTCCGGCTAGTTTTCCCGGGGGCAGGTGTAGCCTTGGGCGCG |
| | | | | | | 336 | |
| | | | | | 2524 | 12666 | GCTTGCCGAGTCCCAAGCAGGCAGGTGAGCTGGAGGGCGGGGATGTCCCG |
| | | | | | | 317 | |
| | | | | | 2525 | 11062 | ACCAGCACGTATGTTTTATCAGAATGGCCTTGAGAAAACGAAAGCACACG |
| | | | | | | 7473 | |
| | | | | | 2526 | 62362 | TGGGGCTGAGGCCTCGGGCTAGGGAAGGCGCCAAGGTGGATTCGGGCCCG |
| | | | | | | 783 | |
| | | | | | 2527 | 37173 | ATAGATGTGGACAAGAGAACATCTTTTACATCTCCACAGCTTTCAACTCG |
| | | | | | | 638 | |
| | | | | | 2528 | 21367 | CGGATGCGCGCCTTAACAGTTGTCCGTTTAGCAGGAGGTTTTGAGCTCCC |
| | | | | | | 368 | |
| | | | | | 2529 | 11638 | AAAGGAATCAGGGTATTTTGCTGGAAGGATGGCTGCCGAGGCCTACCACG |
| | | | | | | 1079 | |
| | | | | | 2530 | 81426 | CGAGTACCCCTTGCTTGTCGAGGCAACAAAGAGGAGCTTTTAAATGGAAG |
| | | | | | | 347 | |
| | | | | | 2531 | 60386 | AGTCTCGCTCTCTCCCATTCATTATCTTTAGCTCTCGGGTCCTGGAAGCG |
| | | | | | | 475 | |
| | | | | | 2532 | 28367 | GTGACCCACAAAGGCCGGAAGCGGCCACGGGGGGTCTAAGAACCAGCCCG |
| | | | | | | 571 | |
| | | | | | 2533 | 37249 | AGGAGAAGGCACCTAGGAGAAACGTCTTAGGGAGTAGTCCCGCGGGTCCG |
| | | | | | | 481 | |
| | | | | | 2534 | 27561 | GGTTTTCAAATGGGCCCCCGAGGCCTGGGAGATCCCCGAGTAGCCACGCG |
| | | | | | | 13 | |
| | | | | | 2535 | 15879 | CGACAGGAGTTACCATGTTTCAGGACAGCTTTCTGCCCTGATATGGTTTG |
| | | | | | | 9935 | |
| | | | | | 2536 | 46527 | ACTGTGGGGACTGCCTGCGAAACGCCTTGGAGGCCGCTGTGTGAGCTGCG |
| | | | | | | 098 | |
| | | | | | 2537 | 42727 | CGCCTGTGCCTCTCCAACTGCTTGGCCGTCTTCCGTCTCGGCCTCCTGCT |
| | | | | | | 489 | |
| | | | | | 2538 | 64887 | TTTGCTGATGGCTGAGGGCTTGGCCAGCCACCGGCCCGCCTGGGACGCCG |
| | | | | | | 827 | |
| | | | | | 2539 | 64875 | CGCACAGCTCCTCCGCAGGCTCGCCCAGGGCCAGCAGCAGCTCCACGCAC |
| | | | | | | 750 | |
| | | | | | 2540 | 17074 | CGGGGCACCCTGATCAGTTTCCTCAGGTTCAGCCAAGGCCTCTGTGGTTC |
| | | | | | | 6291 | |
| | | | | | 2541 | 65015 | CGGGATCCTAGGGAAGGCAGCCACAATGGAGATCCCTATCCACGGGAACG |
| | | | | | | 94 | |
| | | | | | 2542 | 19152 | CGCCACGGAAACCCAAACAGAACTCCGTGGGGAGCGAGGGTCTCACCTGC |
| | | | | | | 335 | |
| | | | | | 2543 | 36604 | CGCCTTACCCCAAAAGAACAGGCAAGAGAACTTCACCAATAGGTAAGGGC |
| | | | | | | 764 | |
| | | | | | 2544 | 51139 | AGGATTCACGGGCCTGTAGGGGCTCAGACTTCAAATTGAACCGCGCCTCG |
| | | | | | | 247 | |
| | | | | | 2545 | 11403 | TCATTTTAACGTGCGCAGGTCAGCGATGGGCTGAACGTTCCTTAAAATCG |
| | | | | | | 3360 | |
| | | | | | 2546 | 10289 | AAACCTGGTTCCAGAACCGGCGGACAAAGTGGAGGTGAGCAAGCGGGGCG |
| | | | | | | 4148 | |
| | | | | | 2547 | 97316 | AGTAGCCACCATTTGGTTAACAGACATGAAAACAAACCTTCTGACACTCG |
| | | | | | | 699 | |
| | | | | | 2548 | 73628 | CGCCTCCCCCACCTGCGCGAAGGCGAGGAGGTCCCACCTGCCTCAGCTGT |
| | | | | | | 634 | |
| | | | | | 2549 | 10487 | GGAGTGGGTGGCGGCGTCCGTGGGCGGCCGGGAGCCTGGCGTGGGTGGCG |
| | | | | | | 65 | |
| | | | | | 2550 | 11953 | CGCCCCCGGGACCCAGCTCTTTCCGGCTTCTTTGCAAAAGGATAGAACCG |
| | | | | | | 2195 | |
| | | | | | 2551 | 44326 | TGACAGCAGTGTTTCTTGAATAGGGTGACACTTCAGCCAGGGCATTTGCG |
| | | | | | | 516 | |
| | | | | | 2552 | 93516 | TATTACCTTAGCCATCTCCTTATTCCATGCTGACTGCTGAAGCCAAATCG |
| | | | | | | 589 | |
| | | | | | 2553 | 13611 | CGGCCACCCCGTGATTTTCTCTGAAAACTGCGACAGACTCGCAGCCTGCC |
| | | | | | | 400 | |
| | | | | | 2554 | 30383 | AACTTTGGACCAGCCTGTTTCACTCCAAAGCCTTTGGGGCTCAAGCTTCG |
| | | | | | | 960 | |
| | | | | | 2555 | 15557 | CGTGCTGAGAAAGGCTGTGACTAAATTAGTAAGATTTTCTTTAATTACTA |
| | | | | | | 0275 | |
| | | | | | 2556 | 19436 | CGCCAGGACTCACCCCGGCTCTCCACCTCCGCTGGGGGTTTCAGGTTCTG |
| | | | | | | 896 | |
| | | | | | 2557 | 75005 | CGGGTTCCACTAACTTTATCTCCTGAGGAATGCCTCAGGAATGCTACAAG |
| | | | | | | 362 | |
| | | | | | 2558 | 67391 | GTCTCCTTGCTACTGAGGCTCTCTTTCCTTTGATCCAGATGGTGTGGTCG |
| | | | | | | 835 | |
| | | | | | 2559 | 75315 | GGCAGGAGGAACGGCCGTGCCCCAGGCCAGCGTGCTGAGAAAAGGTTCCG |
| | | | | | | 667 | |
| | | | | | 2560 | 63446 | GGGATGGCAACTTGACACCACAAAGTATGGTTCTATTGGCTTAGCCAGCG |
| | | | | | | 044 | |
| | | | | | 2561 | 13428 | CGGTTGGTCCTTCACTGAGATCCCAAAGATCGAAGTCCTGGGCCTACTGC |
| | | | | | | 8122 | |
| | | | | | 2562 | 59729 | TTGTGCTTCCTCTCGGTGGGCAGGATTTCAGCGGAGTTGCGGGGGACACG |
| | | | | | | 553 | |
| | | | | | 2563 | | |
| | | | | | 2564 | 22818 | CGGAATATCCATAGAAAAAAATTCCAAGAATGTTTGGAGAGCAACGCATG |
| | | | | | | 572 | |
| | | | | | 2565 | 86233 | CGCTTCCTGGCATGGGGGTCGAATCATGTCGATAAAATGGGCTCGGTTTC |
| | | | | | | 236 | |
| | | | | | 2566 | 70681 | CGATGTGAAGCACATTCTGCGACTCCGCTGGAAACTCTTCAGCCACCCGT |
| | | | | | | 804 | |
| | | | | | 2567 | 13357 | CGACAGGTGAGAACAATGACAAGGGATCCACACTGTCAGGAATCTCATTA |
| | | | | | | 4073 | |
| | | | | | 2568 | 15114 | AAATCTCCGACGACGTGACGGCTGCTGCGGTGGGGAGCCGGGGAGGCTCG |
| | | | | | | 3302 | |
| | | | | | 2569 | 24803 | GCGGGGTGGTAGCGGCTTTGAGCGGGTGAGAAAAGCTCAGGTGGGGCCCG |
| | | | | | | 925 | |
| | | | | | 2570 | 17699 | CGCCCCTCAAGACCTGGCCTTAGCCTAATCTCAGGGTTTGCCCCACCCCG |
| | | | | | | 773 | |
| | | | | | 2571 | 15811 | CGGCATCCTTGGGCACGCACAGTAAGTTTGGCAGTTAAACACGTTAGCGG |
| | | | | | | 4605 | |
| | | | | | 2572 | 15402 | ATTTTAGCACCCTGCAAACAAGTCCTGAGAGGGCAAGCAAGCTGCTGACG |
| | | | | | | 7256 | |
| | | | | | 2573 | 11947 | CGTGATGCAGTATGGCCCCCGGGAGGCCGCCCCCAGATTCTAGAGGGGCT |
| | | | | | | 571 | |
| | | | | | 2574 | 77766 | CGTGGCCCCCGGCCCCTGCCCACCCACCCCCCAGGTCAGCGTCGCAAGAG |
| | | | | | | 120 | |
| | | | | | 2575 | 83960 | CGTGGATTTTGCAAAACCGTCATGTTCTCAAAAGGAGACCAACAGCTGAA |
| | | | | | | 56 | |
| | | | | | 2576 | 27999 | CGGGCATCTTACACTGTGAGTAGCTGTGGTTTTTTTCAAGATCGAAAGTT |
| | | | | | | 728 | |
| | | | | | 2577 | 21022 | CGGCCCAGAGTTTGACCCCTCCTAGCGAGTTCTTCCCGGCCAGCTGCCCA |
| | | | | | | 431 | |
| | | | | | 2578 | 43276 | GGGAGACAAAGGGCTATTTCGCTGTTACTTCAAAGAGCATTAAAGCCTCG |
| | | | | | | 744 | |
| | | | | | 2579 | 14709 | CATTCCTTTGTATGCGCGGGGCGCTGCGTGTCTGAGCTGGCGTCCTTGCG |
| | | | | | | 6130 | |
| | | | | | 2580 | 58554 | CGGGCTGCCCCGCGCAGAGCAGCTCCACCTGTCCCTCACCTACGCTCCCG |
| | | | | | | 527 | |
| | | | | | 2581 | 77595 | CTAAAACCTCACCAGAACCGCGCGGAAGTGAGAAGTCGCGGCCAAAGGCG |
| | | | | | | 359 | |
| | | | | | 2582 | 38035 | CGTGGAGGATGACATAGCAGTGTTCCTCAAAAAAGTTCCCGTAAGCCCCC |
| | | | | | | 463 | |
| | | | | | 2583 | 75315 | GACTCATGCGTGTGTGGTAGGAATCTTCCAGGAAGTCCCCGTCCCGTTCG |
| | | | | | | 567 | |
| | | | | | 2584 | 19184 | CGCAGCTCTCCGGATAGGCCGCCATCGCTTCGGCTTGGCCCTGCCTCTCA |
| | | | | | | 961 | |
| | | | | | 2585 | 74421 | CCTTTCCTGGTTATGGCCGGTAGCTGTCTCCAGGGCTAACGTGGGCAGCG |
| | | | | | | 918 | |
| | | | | | 2586 | 17702 | CGCAAAGGGCTCTCTCCGACTTGGAAAGTGCAGGGATCCCAAGAATATCA |
| | | | | | | 2056 | |
| | | | | | 2587 | 42277 | CGCCAGGACACCCCCCAAATGCGCGCCCTGGCACTCGTGCTGCGTCCTGT |
| | | | | | | 807 | |
| | | | | | 2588 | 13021 | TCACTCTTATCAGACTCCAAGAATTTAACCAAACCAGACAATCTAATGCG |
| | | | | | | 6901 | |
| | | | | | 2589 | 15128 | CAGGGAAGCCCTAGGGGGCCGGATGTGATGCTGCTGACTTGTGCATTGCG |
| | | | | | | 6477 | |
| | | | | | 2590 | 10539 | TTCGTCCTGATCACTCCATCTAAAAAACTGGTGTTCCCATAAGAATTACG |
| | | | | | | 8579 | |
| | | | | | 2591 | 62363 | CGCCGCGCCCTGGCCAAGCAACCCGCACACCACTGACTGGGGATCCGGGC |
| | | | | | | 076 | |
| | | | | | 2592 | 11953 | CGCCAGTCGTCCCCTGGATGCTCCTGGGCCGACTTTAACCCCTGGCTTCC |
| | | | | | | 1093 | |
| | | | | | 2593 | 18905 | AACTCCGAGATTGGTAACAAATGCCACAAATTCACTGTGTCCCCTGCTCG |
| | | | | | | 9677 | |
| | | | | | 2594 | 13540 | GGCGCCCGGGTCCGCAGGGTAGGTGGAGTCTGCGGTGGAAGATGGAGCCG |
| | | | | | | 946 | |
| | | | | | 2595 | 99947 | TAGTATTCTTTTATATTTCTTTCATTGGGCACTTTCCCATCTCCAACTCG |
| | | | | | | 171 | |
| | | | | | 2596 | 10849 | CTGGAGAGGGCCAGGCAAGGGCACAGCGGGTCTTGTCCTCCACTCCTTCG |
| | | | | | | 0895 | |
| | | | | | 2597 | 11138 | GCAGGGGCTGGTACCAACTTGGCGGTTCTCGGAGGGGCGGGGCAGGGGCG |
| | | | | | | 5461 | |
| | | | | | 2598 | 85673 | AATCCGAAGCCCAAGGAACCAGATGCATTGGCAACTGTTAATCGCAGCCG |
| | | | | | | 347 | |
| | | | | | 2599 | 75279 | CGGCATCTGTGCAGGAGGGTCTCCGCAGAAAAAACCCAGGACCCACGACC |
| | | | | | | 120 | |
| | | | | | 2600 | 85417 | GGTGTCCGCCACAGACTGAGCTTTCTTTCCCCACAAAACATTGTTTTTCG |
| | | | | | | 077 | |
| | | | | | 2601 | 37920 | CTCCCGCCTGGATCAAATTCAGGTGACTAAGCGCGTCTGCGAGGGAGGCG |
| | | | | | | 74 | |
| | | | | | 2602 | 17519 | CGCACCCTGGTCTGCTTGAGGACGCCTCTTTTCACACTGACAAGGTCCAG |
| | | | | | | 8280 | |
| | | | | | 2603 | 15726 | CGGATAATCCCGGTCCTGAGCCCCAGCGGCCAGTCTCCTTTACATATGAA |
| | | | | | | 166 | |
| | | | | | 2604 | 81166 | CGAAAGCCCGTCCACATCAACTCACCCTGGGCAATGACGTCTTCAATGTT |
| | | | | | | 9 | |
| | | | | | 2605 | 24323 | CGCTCGCCCGACAGCATAGTACTTGCCGCCCAGCCACGCCCGCGCGCCAG |
| | | | | | | 840 | |
| | | | | | 2606 | 53029 | CGGAGCCTGGGCTTTAAGGACTGGATGACCAGTGGGATCCAGTCTTCAAG |
| | | | | | | 709 | |
| | | | | | 2607 | 11637 | CGCGCCCCACCCTCAGCCGCCCCCAGGCAGCCTGCACGACCCAGCTCCTG |
| | | | | | | 1487 | |
| | | | | | 2608 | 13524 | CACCTGCGGAGGCCTGTGGCGAGTGCCGAGCTGAACCCACACCTGGAACG |
| | | | | | | 041 | |
| | | | | | 2609 | 41306 | CGGGGGATGAAGACACTGCTGCCATGGACAGCCCGTGCCAGCCGCAGCCC |
| | | | | | | 455 | |
| | | | | | 2610 | 13348 | CGCCCCAGCCCGTCCTGGCTGCCACCCGCCGTCCCTGAGAAACGCTCAGA |
| | | | | | | 4026 | |
| | | | | | 2611 | 86233 | TATCGACATGATTCGACCCCCATGCCAGGAAGCGTGCTCTCACAGAAGCG |
| | | | | | | 220 | |
| | | | | | 2612 | 46995 | TCCCCGGAGTTACAGTCGGAACAAACTTGCCGAGTCTTGCAGCGCAAGCG |
| | | | | | | 743 | |
| | | | | | 2613 | 12197 | CCTTATGAACCTGGAGGTATTGTGCTTCCCACATCACAGCAGCAGACACG |
| | | | | | | 2775 | |
| | | | | | 2614 | 81471 | CGGCCCATCTCTCAATTTTCAATCCAGCAGTTTGTACACGGCTGGTTTAA |
| | | | | | | 533 | |
| | | | | | 2615 | 23347 | ACTAGACCGACCATTAAATCTCCAGAAAAGGCCCAAGTCTAAAGTCTGCG |
| | | | | | | 412 | |
| | | | | | 2616 | 36990 | CTTAGCTGTTTTAGTCTCCTCTGCGCGCCAGGGGCTGGGAGGGCGGAGCG |
| | | | | | | 534 | |
| | | | | | 2617 | 22510 | CTCGAGTTCCGCGGATGGCCTGGAACCCGCAATTGGAGGAGTTGAGAGCG |
| | | | | | | 67 | |
| | | | | | 2618 | 15780 | CTTAGTCGCCAACCCACCTCATCTCAGGATGAATTTCAGTGTACTTGACG |
| | | | | | | 238 | |
| | | | | | 2619 | 15950 | CGCACACACAAGGGCTAAGGATGTACCAGAGAAGAGCATACGTAATTATG |
| | | | | | | 7162 | |
| | | | | | 2620 | 11103 | CCCCGACTGCTGGGCTGCCTCCTCGGGCAGGTGTGAGACTGCAGGGGACG |
| | | | | | | 9873 | |
| | | | | | 2621 | 11952 | GGTACCTCACAGACCCTTCTCCAAAGTCTGGCGGGCCTTGGGGTTTTTCG |
| | | | | | | 7377 | |
| | | | | | 2622 | 27153 | CGAAGTTTCTCAAACGAATTCCTAAGAAATAGAGCCCAGCAAGAGAGCCC |
| | | | | | | 944 | |
| | | | | | 2623 | 44640 | CGGGACAAGCTCTTCGGCTTCTGCCCGACCCGAGGTACCTCCACCCTGTC |
| | | | | | | 353 | |
| | | | | | 2624 | 23907 | CCGACAACGTCACTGTGATGGTGGTGCGGATAGGGCACTGAGGGGTGGCG |
| | | | | | | 9168 | |
| | | | | | 2625 | 21667 | CCTCTCAATTTCTGCATATTCATCCCTACATGAGTGCAGCTGGAAGAACG |
| | | | | | | 166 | |
| | | | | | 2626 | 77765 | GGGTCTCAAGACAGCTACGAGGGGCTGGCACCGGGAGGCTTTGGCTAACG |
| | | | | | | 514 | |
| | | | | | 2627 | 74024 | GGACCCAAGTTCAAGTTCCCTCCTCTCCAAACTCATCTGTTCTGGTCCCG |
| | | | | | | 572 | |
| | | | | | 2628 | 90357 | TCTCTGGCCAACACTGGGCTCAGAGGCCCTTTCTTTAACCTTAGATCTCG |
| | | | | | | 521 | |
| | | | | | 2629 | 19915 | TCCGAGGCAATTGTGTCAATGAGCTATTCAAAGACAAAAATAGTATGACG |
| | | | | | | 716 | |
| | | | | | 2630 | 10887 | CGCCCCCTGAAGTTTACTAGAGCTCTGTGTTTTGAGACTCAAGAAGCGCG |
| | | | | | | 185 | |
| | | | | | 2631 | 10152 | CGTGGTGGATTCGCTTTACTTATGACGAATCATTCACGGACAACACTTTT |
| | | | | | | 0662 | |
| | | | | | 2632 | 15890 | CGACACCAACTGGCAGATGATGTTGTGTTAACCCAGCAGCAGATCTGCAA |
| | | | | | | 0549 | |
| | | | | | 2633 | 13131 | CGGCCTCCATGCTTCTGGACACACACACGCTTCTCTGAAGGGCCAGCTGG |
| | | | | | | 9616 | |
| | | | | | 2634 | 20359 | CGCGCTAAATAACGACCTCACGGAGAAGCCGTCCCCGAGCCCACCAACAT |
| | | | | | | 8623 | |
| | | | | | 2635 | 31846 | CGGGATCCCCGGAGCCTGCCGTCCTTTGTTGAAATTACCCTCTGCCCAAT |
| | | | | | | 533 | |
| | | | | | 2636 | 64937 | CGCAAACTACAGCAGGATATGCGGAAAGCAACAAAAAGAGTCCCCCAGCA |
| | | | | | | 345 | |
| | | | | | 2637 | 26666 | TTGGAGGAGAGCGCAGGAGCGGAGGCTGCGGTGGGAGCCACTTTCCCCCG |
| | | | | | | 060 | |
| | | | | | 2638 | 81471 | CGCGGTCCCCGAGTGTGCGACAAATGGTACTCTTGCAACTTCCTGGGGCC |
| | | | | | | 884 | |
| | | | | | 2639 | 54507 | CGTGAGGTGACCCTCACCCAAGCCTTTCATGTGTTTGGCATGCTTAATTT |
| | | | | | | 223 | |
| | | | | | 2640 | 58554 | GCTAACACTGCCTGAGGCACCTCTGCTTTTGAAGTCGCCGGGGATTAGCG |
| | | | | | | 479 | |
| | | | | | 2641 | 97831 | CGCTGAGGGCGGTGAGCGAGGGCGCCAAGGCACAGGTGGGGCGGGAGTC |
| | | | | | | 92 | G |
| | | | | | 2642 | 85478 | CGGGCTCAGACCTGATTCTGATTCTTCTACCTGAGAACTGCGGAGTTGTT |
| | | | | | | 807 | |
| | | | | | 2643 | 13588 | CGCAGCCAGGTGGGGCACAGCTGATGCAAAAGGAGCTAACTAGGTGCAAA |
| | | | | | | 301 | |
| | | | | | 2644 | 28129 | GCTGGTTGCTGCTCACAGGCAGAGAAACGCTGGTATGCATTTGGGTGTCG |
| | | | | | | 616 | |
| | | | | | 2645 | 58716 | TATACATCACTACCGCATTCCCCCGAATAGGGGAGCCCCTCAGCATTTCG |
| | | | | | | 257 | |
| | | | | | 2646 | 93897 | GCCCGTGTCGCTACCATTCGGACAAAACGCACATCAAATTGCAGAATTCG |
| | | | | | | 195 | |
| | | | | | 2647 | 13092 | CGAAACCCTACGCCATTACAGAGTTCTAGTGTGGGCTACCTGTTGGGACA |
| | | | | | | 6603 | |
| | | | | | 2648 | 93779 | CGCGGAGCGAATGGTGTGCCAAGGAAGCAAGAAACTCCCACCAAAGCGAC |
| | | | | | | 84 | |
| | | | | | 2649 | 11381 | CGGAGGTAGCTGGACCGAAGCAAAAGATCGAGCCTCCGGTTTGGCTACTT |
| | | | | | | 7409 | |
| | | | | | 2650 | 13110 | CGCAGAGCACAGCGCTCCAGGTGCGCACTCGGGGCCAGCACTGTTCCCCA |
| | | | | | | 1463 | |
| | | | | | 2651 | 38964 | CGCTTTGTGTTGCTGGACCTTAAGAACTGACACACTTATTCACAGTCAGC |
| | | | | | | 993 | |
| | | | | | 2652 | 19915 | GACGTCATACTATTTTTGTCTTTGAATAGCTCATTGACACAATTGCCTCG |
| | | | | | | 762 | |
| | | | | | 2653 | 14708 | CGGCTCCCAGTGCGCGCGCATACCACATTTCCACAAACGTGTGTTACAAA |
| | | | | | | 7237 | |
| | | | | | 2654 | 22106 | CGGAAGACCCAGGACCTTCCTATGCTACACCCAAAGCCATTGAGAACGGG |
| | | | | | | 5480 | |
| | | | | | 2655 | 49297 | CGCGGTCCTCCACTGGGTAGGGGGCGCTCCAAGACAGGGACTCTTCTAGC |
| | | | | | | 822 | |
| | | | | | 2656 | 74707 | GTGGAAGTAGTTGGCCCCCCGGCCTCGAGCGGGGTGGATGAATAGCTCCG |
| | | | | | | 400 | |
| | | | | | 2657 | 66320 | CGGTCAGAAAGTTGAAGTTCCACAGCCACTGAGTTGGTAGGTACCACAGT |
| | | | | | | 20 | |
| | | | | | 2658 | 97326 | AATTTCCTGGTAGAGACAGGAGTTGTCCTGGGCCCCTGACATCCCAGCCG |
| | | | | | | 893 | |
| | | | | | 2659 | 89952 | CGGACCCCTGCGGGAAAACCAGACACTTCTGTTTCGTGGCTTTCGGGCTG |
| | | | | | | 904 | |
| | | | | | 2660 | 58207 | CGCCTAGGACCCGACACTGCAGCTGTCCGTTCTTGCCAGAGTCCCGGTCA |
| | | | | | | 859 | |
| | | | | | 2661 | 89560 | CGGGGCGCCTGGACCCCACTCGCCTCCATCTTGCTGCTGCTGCTTGGGCC |
| | | | | | | 715 | |
| | | | | | 2662 | 13356 | AGAGTTCCAGGCAATTCCGGGGGCTGCCCCACAGAAGCAGGTGGGGATCG |
| | | | | | | 2087 | |
| | | | | | 2663 | 45613 | GTCACCTGGGGAGTCGAAAATACTGAAATCCTGCGAAATTCCCTGTTGCG |
| | | | | | | 676 | |
| | | | | | 2664 | 10988 | CGTGCAGGCCCCGTCCACCCTCGGCACTGCCCGCACCCACGGCCCACCTG |
| | | | | | | 47 | |
| | | | | | 2665 | 10044 | CGCGAAGGCACCCCACGCTCCTAGAAAAGAGCACGACGCACCCGATGCTC |
| | | | | | | 2120 | |
| | | | | | 2666 | 10090 | GCCCGGGGAGTCGGCCGGCCAGGGAAGCTAGTCGGCTTGGTGTAGACCCG |
| | | | | | | 9238 | |
| | | | | | 2667 | 16906 | GGTTTGTTCAGTCCCTAGGCACGGCAATCAGGAAACTCTCTGCACTTGCG |
| | | | | | | 4024 | |
| | | | | | 2668 | 17073 | CTCGCGGCTCGGCGGGTCTAGGGACTTCGGGTTCCTGAATGTCAAAGGCG |
| | | | | | | 5347 | |
| | | | | | 2669 | 27265 | CGGGCCTATTCTCTACACACAAGTAGGGGCCGACAGGCTTGAGCGCCCTC |
| | | | | | | 522 | |
| | | | | | 2670 | 23083 | CGGTGGAGTTGAGGTGACATTTCACTGGCATGGAGACCTGAAACCAAAAG |
| | | | | | | 353 | |
| | | | | | 2671 | 32173 | CGGATATTACGGAAACACTTGGAAGCTGAACATCAGCCCGAGGACTCACT |
| | | | | | | 093 | |
| | | | | | 2672 | 50888 | CGCGCCTCCCGGCTCCACTGGCGACGCTGGAGCTCTTGGCCGCTTCCCTT |
| | | | | | | 826 | |
| | | | | | 2673 | 66638 | GGTGGGAGCTCCGAAGGGGTGCCGGGGCGGTGATCGGGAGGTCTCCAGCG |
| | | | | | | 433 | |
| | | | | | 2674 | 95939 | CGCCAAGGGTCAAGCACAGTGCTTGGTTCACAGAAAGGGGTTCAATATTT |
| | | | | | | 442 | |
| | | | | | 2675 | 54500 | GCGGAGGGTGGTGGGCTCCGAGTCCCGGGCGAGGGCGCGGAAGATGCTCG |
| | | | | | | 619 | |
| | | | | | 2676 | 33892 | ATTCAGCTGACAGTGTCCGCTTTCGGCGGGGTGTGGAATGGGCCAGAGCG |
| | | | | | | 223 | |
| | | | | | 2677 | 36253 | GAGGGGTACACACATTTCTGAAACTACTAAAATACTCACCTCCTGGGACG |
| | | | | | | 54 | |
| | | | | | 2678 | 10249 | GGCGGCGGGCGGCTCGGGTTATCTGAGCCGCTTGGTGTTGGGTGGCTGCG |
| | | | | | | 5354 | |
| | | | | | 2679 | 40680 | ATCAATAAAATGCTCACTGAAAACAAGTTACAAAAGCAATTTGGAGAGCG |
| | | | | | | 670 | |
| | | | | | 2680 | 80201 | AGGAACTCTTGAGGCCCTCGGAGAGCAGTTAGGGACCGCAGGCTGCCGCG |
| | | | | | | 887 | |
| | | | | | 2681 | 17275 | ACAATGCCTCCGGGCTGCGCGAGGTTGATAAGGGAGCAGCACCGAGCTCG |
| | | | | | | 1269 | |
| | | | | | 2682 | 65731 | CGGGGAACACGTGTAGCCTCCGGAGACCTAGGGGTCCATCGCTCCTCCCC |
| | | | | | | 432 | |
| | | | | | 2683 | 67874 | CGGAGTTCCGCAACTCTCCCCAGACGTCCGGAAGCAAATCGCGTCCCAGG |
| | | | | | | 206 | |
| | | | | | 2684 | 31376 | GCTCTCGGCTGCACTTGGGCAAGAGATAGCTGGAGCTATCGCCGCCTGCG |
| | | | | | | 092 | |
| | | | | | 2685 | 21022 | CGTCACCTGAGGGGGGCACTTCCGGTCTCGTGCCGCCTTCCCAGGACCCT |
| | | | | | | 877 | |
| | | | | | 2686 | 10231 | GGGAGCTGCAGAGCTACGCAGCCTTCGGTGCAGTCGTCACTCGTGTCTCG |
| | | | | | | 9088 | |
| | | | | | 2687 | 17719 | CGGGCGCTCCTGTGGTAGAGGGACTGGAACACTGTCCCATGTTGAGTGAA |
| | | | | | | 375 | |
| | | | | | 2688 | 86320 | CGCCCCTCGCCAGCGCGCTCGCAGCCCATCGGCTCCTGCCGGGGCCCCTC |
| | | | | | | 857 | |
| | | | | | 2689 | 92580 | CTTCCAAATCAAAGTTAACCAAAACAGCTTCAGAAGATGCCCATGGATCG |
| | | | | | | 100 | |
| | | | | | 2690 | 79171 | CGCCCCGGCCTCTCCTGATAGCACCTGGCACCTGCGTGAAGTATCCCTAC |
| | | | | | | 469 | |
| | | | | | 2691 | 13857 | CGTCAGTTTTTTTGAAAAGCCACTTTAGGAATAGACCAAAGGGGCTGGTG |
| | | | | | | 594 | |
| | | | | | 2692 | 10299 | TTTTCAAGTGCCTTAATTGGCTACTCCCCTCCGCGGGGAATTGGGCGCCG |
| | | | | | | 6254 | |
| | | | | | 2693 | 37387 | CGCGTTCATCCTGCTCCTCGCTCGCCAGCTCCCGTGCGGGGGCTCTAAGC |
| | | | | | | 577 | |
| | | | | | 2694 | 28832 | CGGACGTCTTTTGACTGGGTTCAGGTCACACTACTCCCAAAATACGACAC |
| | | | | | | 567 | |
| | | | | | 2695 | 43945 | CGGCCTTCTGCAGCGACTGGCGCTGGCTGCGCGCTCCCATCACAATCCCC |
| | | | | | | 364 | |
| | | | | | 2696 | 10090 | CGAGGGAAAATGAGACTTCCCCACAGGTTAATAAACAACCTGTCCGGCAC |
| | | | | | | 3839 | |
| | | | | | 2697 | 87682 | CAGGCCGCGTGAAGTGAGAAACGGTTTGCGGTGTCCTCCGCGGAGTGCCG |
| | | | | | | 142 | |
| | | | | | 2698 | 31637 | TGTCCCCTCTTACTTGTTCTGTCTTTCTCTCTCTCGCTTTAAAGGTGTCG |
| | | | | | | 348 | |
| | | | | | 2699 | 12195 | CGGTTCTTGCTCACGAGTTCCAAACAGTTAAAGTGACGTTGGCAAGGCCG |
| | | | | | | 0506 | |
| | | | | | 2700 | 15975 | CGGGGCTCCAGGCTGGTGCTTGTGCTGAGAATGACTGCGGGAGGGGCTCG |
| | | | | | | 6793 | |
| | | | | | 2701 | 56250 | GCTGCTGTGATCTTCCTGTCAAGCTGGTGACTGAGACTTCCCATCACTCG |
| | | | | | | 46 | |
| | | | | | 2702 | 20209 | TCTAGACACCAGTGGGCCGAGTGGAGCAGATGCCAGTTGGGACCTTCCCG |
| | | | | | | 8951 | |
| | | | | | 2703 | 17273 | CGCCTGCAGCCGGCGACTTTTCCCCAGGAATCTCTGGCCTGGCGCCCTTT |
| | | | | | | 4266 | |
| | | | | | 2704 | 21199 | CGGGAAGGCACTCCCTGACCGCAGATCACACTCTGCAGCTGATCCACACC |
| | | | | | | 691 | |
| | | | | | 2705 | 13626 | GGGCCTTGTCTCCCTAACGAGTGCCAGGTGAGGCTGCGGCGGCTCCGACG |
| | | | | | | 26 | |
| | | | | | 2706 | 13283 | CGCAGAGGGAGGAGAAGAGAAGGGGCAGAAACTAAACAGCCATAGTAGG |
| | | | | | | 794 | |
| | | | | | 2707 | 14572 | CTGGGGGAGATCCGCAAGTTAGCTTATGCGGTAGGGGGTGTCGCACTGCG |
| | | | | | | 2201 | |
| | | | | | 2708 | 43149 | TGGTAACGTGCAGTAGACGCACTGTATTCCATGGGCTCCCTTGTAAGCCG |
| | | | | | | 980 | |
| | | | | | 2709 | 32454 | CCTGGTTAGGCTAAGGTAGGAGCGGCCTGAAGACGCGCGTTTAGAAGGCG |
| | | | | | | 975 | |
| | | | | | 2710 | 79668 | GGCAGTTAGAGACGAGGCGTTTCAGGTGAACTGTATGTAGTGTTACTCCG |
| | | | | | | 668 | |
| | | | | | 2711 | 13724 | CGCCTGAAAACCAAACTGTCTGGCGCTTAACGGTTACCTCGGCTGAGCGA |
| | | | | | | 2062 | |
| | | | | | 2712 | 12619 | CAGAAACTGGAATGTGTGCCTAGCATGCCCCTAACCTGTATATGCACACG |
| | | | | | | 2611 | |
| | | | | | 2713 | 26156 | CTTTGCCTCTGTGGACCCACTGTGGAGGCAAGCAGGACATGAGATAATCG |
| | | | | | | 362 | |
| | | | | | 2714 | 47696 | CGGACACAGAGACTTGGTCATAAGGCAAACATTAACCCCCAGCGAACACG |
| | | | | | | 260 | |
| | | | | | 2715 | 62304 | AGACGGCCTTTCCCTAGGGTTCATAAAGACCCTTTCAAGCCACCCTCCCG |
| | | | | | | 515 | |
| | | | | | 2716 | 91184 | ACATTTTACTCCAAATTACCATTTTAAGAACCCTATGAATCTGCGAGGCG |
| | | | | | | 770 | |
| | | | | | 2717 | 12920 | GCCGCAGCAGCAGCGGCAGTCACAGGCACATCAGCAAAGAGGTACAGTCG |
| | | | | | | 4510 | |
| | | | | | 2718 | 21415 | CGCTATGGGTAGGGAAGCGGGGCTGCCTTGACTCTCAGTGCGGGTCCCCG |
| | | | | | | 3294 | |
| | | | | | 2719 | 17579 | ATATCGGGCGTCTTGCTTCAATTTCCTCCCGAGGTCTTGAGGGATGACCG |
| | | | | | | 2123 | |
| | | | | | 2720 | 30833 | CGGAGGGCCTGGTCGCCTGGAGGAAGCCGGAGGCCTGCGTGGAGGAGGCG |
| | | | | | | 38 | |
| | | | | | 2721 | 59085 | CGAAGACCTAGAGAAAGATGACAGCACGAAGAGAGACAGGGAGAATCCG |
| | | | | | | 561 | |
| | | | | | 2722 | 10090 | CCCTTGGGCGCTCTGGGGCCTACGGAGGCCTTAAACCCCAAAGATTGGCG |
| | | | | | | 3561 | |
| | | | | | 2723 | 10091 | AGCCAAGGTCCAGATCTGCCAAGGTAGGGAGCTGAAAGGCCCCTGCCTCG |
| | | | | | | 2168 | |
| | | | | | 2724 | 13702 | TTGAGTCAAAGGCAGGATCAGGTTCCCCGCCTTCCAGTCCAAAAATCCCG |
| | | | | | | 8389 | |
| | | | | | 2725 | 35395 | GGAGAATGTTCAGGACTGTCGAGGCGCGCTCCGCACCTGGCCTGAAAGCG |
| | | | | | | 973 | |
| | | | | | 2726 | 89951 | CGCGCACCCGTGGCAGCACCACAGAGGGAATAAAAGCAGGGTAAACAATT |
| | | | | | | 870 | |
| | | | | | 2727 | 15385 | CGGCGGCTCTGCGGGGTCCCAAGCCTCCCTGGCCTGGAGGCATTCTAGAA |
| | | | | | | 9740 | |
| | | | | | 2728 | 57244 | CGGACACTGGCCTCTTCGATCTCAGCACCGCAGTCAGAGGTGGTGGGGCA |
| | | | | | | 416 | |
| | | | | | 2729 | 13339 | GCGCGAGAGTGGGGTGGGTGACGCGCGCCAGCCACGGAGAATGAGGCTCG |
| | | | | | | 3454 | |
| | | | | | 2730 | 15358 | GAGTTGATTGCTATTGGGATCCGCTGAGTAAAGACACGGGCAGGGGTGCG |
| | | | | | | 4609 | |
| | | | | | 2731 | 20620 | ATGCAGGACCCATGCCTGCTTCAGTCATCGCAGAGCTGTGGGGCTATGCG |
| | | | | | | 680 | |
| | | | | | 2732 | 17305 | CTTCTGCTTGGGGTCCACCAGACGCTGCACATTTGCCACTCATCTGAACG |
| | | | | | | 61 | |
| | | | | | 2733 | 73163 | CGGTTCCTTGCAGTCCTCCGTGTCGTCCCGCACATCCTCATAGACAACGC |
| | | | | | | 696 | |
| | | | | | 2734 | 10111 | CCGCGAACTCCTGGCAGGTGAGCGAAGCTGCGGCCTTGGTGGGGGCAGCG |
| | | | | | | 1427 | |
| | | | | | 2735 | 39649 | TGCTGCAGGGTCGCGGTGGGGTTTGCGTCTGAAACGCCGGCGGTGGCTCG |
| | | | | | | 443 | |
| | | | | | 2736 | 13959 | CGGCCAGACCTCTCGACAGATCTCATTTTGTCGCGCCGTCTGGCCGCCAG |
| | | | | | | 3505 | |
| | | | | | 2737 | 62353 | CGCTCTGGGGCAGGATGGAGGTTGTGTCCTGGTCAGCCAACGGTTCTGTC |
| | | | | | | 894 | |
| | | | | | 2738 | 11342 | CGGCAGAACAAGAAGTGGCTGTGTCACTGGATACCTGTACATTTGAATAC |
| | | | | | | 5199 | |
| | | | | | 2739 | 20033 | TCCCCCTTTTTCGCCACGCGGAAACTGGCCGGTCTGGACAAGGGATTGCG |
| | | | | | | 2025 | |
| | | | | | 2740 | 10005 | CTAAATGTGCCCAACAGCAAGGAAAATCGAATTGAGTGCGGGCTCATTCG |
| | | | | | | 0791 | |
| | | | | | 2741 | 76746 | CGGCTCTGACCACACACTCCCGCGCGTCGACGCCATGGCCCACACCTCAA |
| | | | | | | 337 | |
| | | | | | 2742 | 62070 | CGCCCGCCCTGCGTCTCCGCACCAAGCCCTGTAGCTCCGAGAGGCATGAA |
| | | | | | | 164 | |
| | | | | | 2743 | 15848 | CGGCTCGGAAGCCGAAGAATCGAAACATGGCTCAAGAAGCTACTTGTCAC |
| | | | | | | 8659 | |
| | | | | | 2744 | 12463 | ACACTGGAATGTTGGCCCAGTGTATGACTCAGGCTAGTTCCCAGCAGTCG |
| | | | | | | 3001 | |
| | | | | | 2745 | 12903 | CGGAAGCAGGTTCAGGATGACAGAGCCAACCCCATGATTACAGACTGAAT |
| | | | | | | 5348 | |
| | | | | | 2746 | 84140 | AGGGGCCCGAGCGAAGCCGGTGTCCCCAGCAGGGCAGCCTGCGAGAAGCG |
| | | | | | | 898 | |
| | | | | | 2747 | 10271 | CGCCCTGGCCTCAGTGCCCGAGTGCAGTTGTCTAACGATGGCCCGTGGTC |
| | | | | | | 2216 | |
| | | | | | 2748 | 10090 | CACTTTGAGAGGGATCCCCTATGGTATCCAGTCAAAGGGGCCGGCACTCG |
| | | | | | | 1804 | |
| | | | | | 2749 | 17714 | CGCACGGCGGCGACACACGGGAGAAGCGAGCATGTTCCCAACATATATAC |
| | | | | | | 293 | |
| | | | | | 2750 | 13136 | TCTCGGAGCCTGGAAGACATTATGACCACTAAGCGGGTGTCCATAATTCG |
| | | | | | | 9037 | |
| | | | | | 2751 | 19788 | CGCCTTCGTTGGGTGGAACGAAGAGGAGTGTGTGTTTGTCTTAAAAATTA |
| | | | | | | 1774 | |
| | | | | | 2752 | 57004 | AGCAACAGTGATTCTTAGAGAAGTAACATTAACACATCACAGAGCATCCG |
| | | | | | | 1 | |
| | | | | | 2753 | 19585 | CGCCCCTGGACACCGCCCAGAAAGGACTCACAGCCAAGTGGCAGGCCAGG |
| | | | | | | 665 | |
| | | | | | 2754 | 10091 | GGCCAGGGGCGAGGCGCTCATTGGCCAATAGGGCTGAGTGACACGAGTCG |
| | | | | | | 2940 | |
| | | | | | 2755 | 11953 | CGGGGCAGGCGCTCACAGACTGTGTCCACTGAACTTCATCTTGTTTTTGT |
| | | | | | | 0702 | |
| | | | | | 2756 | 11954 | CGCCCCCACGGGACTCAGAACCCTGAGGCTCTTCTAGAGACACCAACTTG |
| | | | | | | 2629 | |
| | | | | | 2757 | 22106 | GTGGTCACCATCCCTCTGTGAGCCTCTGTGCACCTTGGTAGCCTTTTTCG |
| | | | | | | 1070 | |
| | | | | | 2758 | 45285 | TCTTGAGGGTATCTTTTCGTGGTGCACCATGGGTATGCAAATCACAGGCG |
| | | | | | | 892 | |
| | | | | | 2759 | 79574 | ACTCGCTCAGCAACTTAGCAGGGGGCTCCTAGACTCCCCGAGGGTGAGCG |
| | | | | | | 893 | |
| | | | | | 2760 | 10823 | CGGGGCCTGCACGGAAGGACAGGGGCGCCTCCCAGACCCACCCTTCCCGC |
| | | | | | | 7150 | |
| | | | | | 2761 | 22363 | ATCACAAAAGAATTAATGTTTTCACAGCCCTTTGAAGACGTGGTGTCACG |
| | | | | | | 174 | |
| | | | | | 2762 | 13663 | CGGCGCGAGGGGTTTCATTTGTCTCAGTGTTGCAAGTTTACAGGTGCTGA |
| | | | | | | 0265 | |
| | | | | | 2763 | 65331 | GCAAGAGTTTGCAAAAACATTGGGCGTCTCATTTGGCGAGCGTTTTGGCG |
| | | | | | | 87 | |
| | | | | | 2764 | 69706 | AGAATGCCCTGCCGGAGATATAGGATAGCAGTATCCCGTGGGGTACGCCG |
| | | | | | | 527 | |
| | | | | | 2765 | 16228 | CGCAGCAGATGGTGGCGGAGCTGCAAGGGAAACGACCTCCCCAATTTTTT |
| | | | | | | 3994 | |
| | | | | | 2766 | 85417 | CGAAAGCCAAGTGGAGGTTCTCTTGGGAAGCCCGGGGACTGTGGCAGCCG |
| | | | | | | 612 | |
| | | | | | 2767 | 64008 | CGAGGGATTTGCACAAGGCTTCATAGTAAGGAGCCATGTCTAACATGCAA |
| | | | | | | 161 | |
| | | | | | 2768 | 67803 | CGGCATGTCCGGATGCTCGTTTCCCAGTAAGATTGTATTAGAAGGCAGTT |
| | | | | | | 251 | |
| | | | | | 2769 | 23350 | GTGTGGCAGGGGAATTTCTAGCCCCTTCCAATGTGTCCCTCCCAGGGACG |
| | | | | | | 651 | |
| | | | | | 2770 | 26797 | GAGGTCGTCGTCGTCGCCCAGCAGCAAGGGCTGCAAAATAGTAGAACTCG |
| | | | | | | 619 | |
| | | | | | 2771 | 14304 | CTCAGGCAGGGCGTGGGTTTCCCTCAGATTCAATGATCCTGCTGGGCTCG |
| | | | | | | 2635 | |
| | | | | | 2772 | 12667 | AATTCGCTCCTGCAGTCCCTAAACTTGACTGTAACCACCTCTGGTTTTCG |
| | | | | | | 5667 | |
| | | | | | 2773 | 42543 | CGCCCCTTGGAAGCTCAGCACCAAAGGCAGGCGGCCAGGGTCCTGGCCCC |
| | | | | | | 161 | |
| | | | | | 2774 | 65360 | CGGGCGGGGCCACCCCAAGCGCCACCAAATTCCTTGTAAGGGCTGCGGAG |
| | | | | | | 366 | |
| | | | | | 2775 | 11671 | CGGGAGCACCCCGCCAGGGGACCGGGAAGGGTCGAGGAAAACTGCTGCCG |
| | | | | | | 1075 | |
| | | | | | 2776 | 10100 | TAAGCCGTCAAAGGGGGCGTGGGGCTTTTTTGTTAACCCTCGGCGGTCCG |
| | | | | | | 6058 | |
| | | | | | 2777 | 29438 | GGCAGTTTTTGTGTCTAATCACTGCCATAGATGGAGCTTCTGGGCTCTCG |
| | | | | | | 91 | |
| | | | | | 2778 | 22298 | CGGAAAATCAGGAGTCATATGAGGAAGGCTGGGAAATGAATTCTCTTGTA |
| | | | | | | 146 | |
| | | | | | 2779 | 74425 | CAGATGCACGCTGGGCGGTGCACAGGGCAGGGCGGGCAGGCGGTACACCG |
| | | | | | | 757 | |
| | | | | | 2780 | 22094 | CGGCACTTAGCTTTCGCGATCGCTATTTCTAGAATTAAGGGACGAGGCCC |
| | | | | | | 009 | |
| | | | | | 2781 | 57125 | CGCCTAATTTTCCGCACGGATGAGTAGACCCAGGCCCAGTTCGGATCCGT |
| | | | | | | 836 | |
| | | | | | 2782 | 62360 | CGCGGTGCTTTAGTGGCTAAAAGTGAAAGAGCTGCCTTGGCAGAATTCAG |
| | | | | | | 162 | |
| | | | | | 2783 | 55125 | CGGGCAGGCTGTGAAGCATCCAACACAAACCGAAGCCGCCCGCCTGGCGT |
| | | | | | | 644 | |
| | | | | | 2784 | 38677 | TTGGGCGGGCGGGGACGCCAGCTCTTCTAAATCCAGGTGAGGAGCTGCCG |
| | | | | | | 218 | |
| | | | | | 2785 | 20692 | CGCTGAGAGTCCTCACAACTGCGTCTCCGGAGGCAGAACGAAGTGGGGAC |
| | | | | | | 113 | |
| | | | | | 2786 | 16344 | CGGCAGATTGTGTAGTGGTGAACCTATGGTTTTCTGAAGATATCTCTTAC |
| | | | | | | 574 | |
| | | | | | 2787 | 14539 | CGGAAAAAATTACAATGGATAAGGACACAGTAGGCTTTTTGAGTATCCAG |
| | | | | | | 5986 | |
| | | | | | 2788 | 15725 | CGAGAGCAATGCGTATACAGCCAGCAGCTCTAAGCCCTCCAAAGTCCTAA |
| | | | | | | 322 | |
| | | | | | 2789 | 21666 | GAGCTTAGTGTGGGGCTGCCCGGGCTGGTCCCCAGCTCACCGCAGCTGCG |
| | | | | | | 098 | |
| | | | | | 2789 | | CGAAGGGCCTGAGGGGTCCAACTGCGCATGTGTATTCCTCGGTTTTCCCG |
| | | | | | 2789 | | TAGTTTCAGAAGAATGTCCAGGGCCTTTCCACCACCCTGGGGGCAGCACG |
| | | | | | 2789 | | TCTGAGTAAGGAAACAGCCTCCAAGCATCAGCAGAGCCCAGATGAGCACG |
| | | | | | 2789 | | GTTGGGAAGGACTTAACTTTTCACCGCAGGGCCTGAGTCCTGGCTTTCCG |
| | | | | | 2789 | | GAGGGGCTCAGGCTGCGGGAGCGCCGCTGCAGGAGCCTGGGCGGGCTGCG |
| | | | | | 2789 | | CGGGGCACAATGATCTGTCCTTGAGGACAAAGAGTGATTCCGGAGAGAGC |
| | | | | | 2789 | | CGGGCCTGGCCCAATTACTTTCTTCAGTCTGAGCATGAGGGCTGGAAGAA |
| | | | | | 2789 | | CGCTACCCTTGTGCTTGCGTTGCCCACAAGCTTGTAGTCAGAAGAACTCG |
| | | | | | 2748 | 10090 | CACTTTGAGAGGGATCCCCTATGGTATCCAGTCAAAGGGGCCGGCACTCG |
| | | | | | | 1804 | |
| | | | | | 2749 | 17714 | CGCACGGCGGCGACACACGGGAGAAGCGAGCATGTTCCCAACATATATAC |
| | | | | | | 293 | |
| | | | | | 2750 | 13136 | TCTCGGAGCCTGGAAGACATTATGACCACTAAGCGGGTGTCCATAATTCG |
| | | | | | | 9037 | |
| | | | | | 2751 | 19788 | CGCCTTCGTTGGGTGGAACGAAGAGGAGTGTGTGTTTGTCTTAAAAATTA |
| | | | | | | 1774 | |
| | | | | | 2752 | 57004 | AGCAACAGTGATTCTTAGAGAAGTAACATTAACACATCACAGAGCATCCG |
| | | | | | | 1 | |
| | | | | | 2753 | 19585 | CGCCCCTGGACACCGCCCAGAAAGGACTCACAGCCAAGTGGCAGGCCAGG |
| | | | | | | 665 | |
| | | | | | 2754 | 10091 | GGCCAGGGGCGAGGCGCTCATTGGCCAATAGGGCTGAGTGACACGAGTCG |
| | | | | | | 2940 | |
| | | | | | 2755 | 11953 | CGGGGCAGGCGCTCACAGACTGTGTCCACTGAACTTCATCTTGTTTTTGT |
| | | | | | | 0702 | |
| | | | | | 2756 | 11954 | CGCCCCCACGGGACTCAGAACCCTGAGGCTCTTCTAGAGACACCAACTTG |
| | | | | | | 2629 | |
| | | | | | 2757 | 22106 | GTGGTCACCATCCCTCTGTGAGCCTCTGTGCACCTTGGTAGCCTTTTTCG |
| | | | | | | 1070 | |
| | | | | | 2758 | 45285 | TCTTGAGGGTATCTTTTCGTGGTGCACCATGGGTATGCAAATCACAGGCG |
| | | | | | | 892 | |
| | | | | | 2759 | 79574 | ACTCGCTCAGCAACTTAGCAGGGGGCTCCTAGACTCCCCGAGGGTGAGCG |
| | | | | | | 893 | |
| | | | | | 2760 | 10823 | CGGGGCCTGCACGGAAGGACAGGGGCGCCTCCCAGACCCACCCTTCCCGC |
| | | | | | | 7150 | |
| | | | | | 2761 | 22363 | ATCACAAAAGAATTAATGTTTTCACAGCCCTTTGAAGACGTGGTGTCACG |
| | | | | | | 174 | |
| | | | | | 2762 | 13663 | CGGCGCGAGGGGTTTCATTTGTCTCAGTGTTGCAAGTTTACAGGTGCTGA |
| | | | | | | 0265 | |
| | | | | | 2763 | 65331 | GCAAGAGTTTGCAAAAACATTGGGCGTCTCATTTGGCGAGCGTTTTGGCG |
| | | | | | | 87 | |
| | | | | | 2764 | 69706 | AGAATGCCCTGCCGGAGATATAGGATAGCAGTATCCCGTGGGGTACGCCG |
| | | | | | | 527 | |
| | | | | | 2765 | 16228 | CGCAGCAGATGGTGGCGGAGCTGCAAGGGAAACGACCTCCCCAATTTTTT |
| | | | | | | 3994 | |
| | | | | | 2766 | 85417 | CGAAAGCCAAGTGGAGGTTCTCTTGGGAAGCCCGGGGACTGTGGCAGCCG |
| | | | | | | 612 | |
| | | | | | 2767 | 64008 | CGAGGGATTTGCACAAGGCTTCATAGTAAGGAGCCATGTCTAACATGCAA |
| | | | | | | 161 | |
| | | | | | 2768 | 67803 | CGGCATGTCCGGATGCTCGTTTCCCAGTAAGATTGTATTAGAAGGCAGTT |
| | | | | | | 251 | |
| | | | | | 2769 | 23350 | GTGTGGCAGGGGAATTTCTAGCCCCTTCCAATGTGTCCCTCCCAGGGACG |
| | | | | | | 651 | |
| | | | | | 2770 | 26797 | GAGGTCGTCGTCGTCGCCCAGCAGCAAGGGCTGCAAAATAGTAGAACTCG |
| | | | | | | 619 | |
| | | | | | 2771 | 14304 | CTCAGGCAGGGCGTGGGTTTCCCTCAGATTCAATGATCCTGCTGGGCTCG |
| | | | | | | 2635 | |
| | | | | | 2772 | 12667 | AATTCGCTCCTGCAGTCCCTAAACTTGACTGTAACCACCTCTGGTTTTCG |
| | | | | | | 5667 | |
| | | | | | 2773 | 42543 | CGCCCCTTGGAAGCTCAGCACCAAAGGCAGGCGGCCAGGGTCCTGGCCCC |
| | | | | | | 161 | |
| | | | | | 2774 | 65360 | CGGGCGGGGCCACCCCAAGCGCCACCAAATTCCTTGTAAGGGCTGCGGAG |
| | | | | | | 366 | |
| | | | | | 2775 | 11671 | CGGGAGCACCCCGCCAGGGGACCGGGAAGGGTCGAGGAAAACTGCTGCCG |
| | | | | | | 1075 | |
| | | | | | 2776 | 10100 | TAAGCCGTCAAAGGGGGCGTGGGGCTTTTTTGTTAACCCTCGGCGGTCCG |
| | | | | | | 6058 | |
| | | | | | 2777 | 29438 | GGCAGTTTTTGTGTCTAATCACTGCCATAGATGGAGCTTCTGGGCTCTCG |
| | | | | | | 91 | |
| | | | | | 2778 | 22298 | CGGAAAATCAGGAGTCATATGAGGAAGGCTGGGAAATGAATTCTCTTGTA |
| | | | | | | 146 | |
| | | | | | 2779 | 74425 | CAGATGCACGCTGGGCGGTGCACAGGGCAGGGCGGGCAGGCGGTACACCG |
| | | | | | | 757 | |
| | | | | | 2780 | 22094 | CGGCACTTAGCTTTCGCGATCGCTATTTCTAGAATTAAGGGACGAGGCCC |
| | | | | | | 009 | |
| | | | | | 2781 | 57125 | CGCCTAATTTTCCGCACGGATGAGTAGACCCAGGCCCAGTTCGGATCCGT |
| | | | | | | 836 | |
| | | | | | 2782 | 62360 | CGCGGTGCTTTAGTGGCTAAAAGTGAAAGAGCTGCCTTGGCAGAATTCAG |
| | | | | | | 162 | |
| | | | | | 2783 | 55125 | CGGGCAGGCTGTGAAGCATCCAACACAAACCGAAGCCGCCCGCCTGGCGT |
| | | | | | | 644 | |
| | | | | | 2784 | 38677 | TTGGGCGGGCGGGGACGCCAGCTCTTCTAAATCCAGGTGAGGAGCTGCCG |
| | | | | | | 218 | |
| | | | | | 2785 | 20692 | CGCTGAGAGTCCTCACAACTGCGTCTCCGGAGGCAGAACGAAGTGGGGAC |
| | | | | | | 113 | |
| | | | | | 2786 | 16344 | CGGCAGATTGTGTAGTGGTGAACCTATGGTTTTCTGAAGATATCTCTTAC |
| | | | | | | 574 | |
| | | | | | 2787 | 14539 | CGGAAAAAATTACAATGGATAAGGACACAGTAGGCTTTTTGAGTATCCAG |
| | | | | | | 5986 | |
| | | | | | 2788 | 15725 | CGAGAGCAATGCGTATACAGCCAGCAGCTCTAAGCCCTCCAAAGTCCTAA |
| | | | | | | 322 | |
| | | | | | 2789 | 21666 | GAGCTTAGTGTGGGGCTGCCCGGGCTGGTCCCCAGCTCACCGCAGCTGCG |
| | | | | | | 098 | |
| | | | | | 2789 | | CGAAGGGCCTGAGGGGTCCAACTGCGCATGTGTATTCCTCGGTTTTCCCG |
| | | | | | 2789 | | TAGTTTCAGAAGAATGTCCAGGGCCTTTCCACCACCCTGGGGGCAGCACG |
| | | | | | 2789 | | TCTGAGTAAGGAAACAGCCTCCAAGCATCAGCAGAGCCCAGATGAGCACG |
| | | | | | 2789 | | GTTGGGAAGGACTTAACTTTTCACCGCAGGGCCTGAGTCCTGGCTTTCCG |
| | | | | | 2789 | | |
| | | | | | NM_1 | | |
| | | | | | 72056; | | |
| | | | | | NM_ | | |
| | | | | | 000238 | | |
| | | | | | 2789 | | CGGGGCACAATGATCTGTCCTTGAGGACAAAGAGTGATTCCGGAGAGAGC |
| | | | | | 2789 | | CGGGCCTGGCCCAATTACTTTCTTCAGTCTGAGCATGAGGGCTGGAAGAA |
| | | | | | 2789 | | CGCTACCCTTGTGCTTGCGTTGCCCACAAGCTTGTAGTCAGAAGAACTCG |
| | | | | | 2787 | 14539 | CGGAAAAAATTACAATGGATAAGGACACAGTAGGCTTTTTGAGTATCCAG |
| | | | | | | 5986 | |
| | | | | | 2788 | 15725 | CGAGAGCAATGCGTATACAGCCAGCAGCTCTAAGCCCTCCAAAGTCCTAA |
| | | | | | | 322 | |
| | | | | | 2789 | 21666 | GAGCTTAGTGTGGGGCTGCCCGGGCTGGTCCCCAGCTCACCGCAGCTGCG |
| | | | | | | 098 | |
| | | | | | 2789 | | CGAAGGGCCTGAGGGGTCCAACTGCGCATGTGTATTCCTCGGTTTTCCCG |
| | | | | | 2789 | | TAGTTTCAGAAGAATGTCCAGGGCCTTTCCACCACCCTGGGGGCAGCACG |
| | | | | | 2789 | | TCTGAGTAAGGAAACAGCCTCCAAGCATCAGCAGAGCCCAGATGAGCACG |
| | | | | | 2789 | | GTTGGGAAGGACTTAACTTTTCACCGCAGGGCCTGAGTCCTGGCTTTCCG |
| | | | | | 2789 | | GAGGGGCTCAGGCTGCGGGAGCGCCGCTGCAGGAGCCTGGGCGGGCTGCG |
| | | | | | 2789 | | CGGGGCACAATGATCTGTCCTTGAGGACAAAGAGTGATTCCGGAGAGAGC |
| | | | | | 2789 | | CGGGCCTGGCCCAATTACTTTCTTCAGTCTGAGCATGAGGGCTGGAAGAA |
| | | | | | 2789 | | CGCTACCCTTGTGCTTGCGTTGCCCACAAGCTTGTAGTCAGAAGAACTCG |

[0103] Although the present invention has been described in terms of specific exemplary embodiments and examples, it will be appreciated that the embodiments disclosed herein are for illustrative purposes only and various modifications and alterations might be made by those skilled in the art without departing from the spirit and scope of the invention as set forth in the following claims.

### REFERENCES

[0104] The following references are each relied upon and incorporated herein in their entirety.
[0105] 1. Prensner, J. R., Rubin, M. A., Wei, J. T. & Chinnaiyan, A. M. Beyond PSA: the next generation of prostate cancer biomarkers. Sci. Transl. Med. 4, 127rv3 (2012).
[0106] 2. Ahmed, H. U. et al. Focal therapy for localised unifocal and multifocal prostate cancer: a prospective development study. Lancet Oncol. 13, 622-32 (2012).
[0107] 3. Gilbert, S. M. et al. Quality of life and satisfaction among prostate cancer patients followed in a dedicated survivorship clinic. Cancer 121, 1484-91 (2015).
[0108] 4. Johnson, L. M., Turkbey, B., Figg, W. D. & Choyke, P. L. Multiparametric MRI in prostate cancer management. Nat. Rev. Clin. Oncol. 11, 346-53 (2014).
[0109] 5. Gleason, D. F. Histologic grading of prostate cancer: A perspective. Hum. Pathol. 23, 273-279 (1992).
[0110] 6. Humphrey, P. A. Gleason grading and prognostic factors in carcinoma of the prostate. Mod. Pathol. 17, 292-306 (2004).
[0111] 7. Tomlins, S. A. et al. Integrative molecular concept modeling of prostate cancer progression. Nat. Genet. 39, 41-51 (2007).
[0112] 8. Andreoiu, M. & Cheng, L. Multifocal prostate cancer: biologic, prognostic, and therapeutic implications. Hum. Pathol. 41, 781-93 (2010).
[0113] 9. Barry, M., Perner, S., Demichelis, F. & Rubin, M. A. TMPRSS2-ERG fusion heterogeneity in multifocal prostate cancer: clinical and biologic implications. Urology 70, 630-3 (2007).
[0114] 10. Boyd, L. K. et al. High-Resolution Genome-Wide Copy-Number Analysis Suggests a Monoclonal Origin of Multifocal Prostate Cancer. Genes Chromosom. cancer 51, 579-589 (2012).
[0115] 11. Brocks, D. et al. Intratumor DNA methylation heterogeneity reflects clonal evolution in aggressive prostate cancer. Cell Rep. 8, 798-806 (2014).
[0116] 12. Cooper, C. S. et al. Analysis of the genetic phylogeny of multifocal prostate cancer identifies multiple independent clonal expansions in neoplastic and morphologically normal prostate tissue. Nat. Genet. 47, (2015).
[0117] 13. Haffner, M. C. et al. Tracking the clonal origin of lethal prostate cancer. J. Clin. Invest. 123, 4918-22 (2013).
[0118] 14. Konishi, N. et al. Heterogeneous methylation and deletion patterns of the INK4a/ARF locus within prostate carcinomas. Am. J. Pathol. 160, 1207-14 (2002).
[0119] 15. Kovtun, I. V et al. Lineage relationship of Gleason patterns in Gleason score 7 prostate cancer. Cancer Res. 73, 3275-84 (2013).
[0120] 16. Lindberg, J. et al. Exome sequencing of prostate cancer supports the hypothesis of independent tumour origins. Eur. Urol. 63, 347-53 (2013).
[0121] 17. Woodson, K. et al. Heterogeneous gene methylation patterns among pre-invasive and cancerous lesions of the prostate: a histopathologic study of whole mount prostate specimens. Prostate 60, 25-31 (2004).
[0122] 18. Schmidt, H. et al. Asynchronous growth of prostate cancer is reflected by circulating tumor cells delivered from distinct, even small foci, harboring loss of heterozygosity of the PTEN gene. Cancer Res. 66, 8959-65 (2006).
[0123] 19. Arora, R. et al. Heterogeneity of Gleason grade in multifocal adenocarcinoma of the prostate. Cancer 100, 2362-6 (2004).
[0124] 20. Ruijter, E. T., van de Kaa, C. A., Schalken, J. A., Debruyne, F. M. & Ruiter, D. J. Histological grade heterogeneity in multifocal prostate cancer. Biological and clinical implications. J. Pathol. 180, 295-9 (1996).
[0125] 21. Jones, P. A. & Baylin, S. B. The epigenomics of cancer. Cell 128, 683-92 (2007).
[0126] 22. Chiam, K., Ricciardelli, C. & Bianco-Miotto, T. Epigenetic biomarkers in prostate cancer: Current and future uses. Cancer Lett. 342, 248-56 (2014).
[0127] 23. Strand, S., Orntoft, T. & Sorensen, K. Prognostic DNA Methylation Markers for Prostate Cancer. Int. J. Mol. Sci. 15, 16544-16576 (2014).
[0128] 24. Hemminki, K. Familial risk and familial survival in prostate cancer. World J. Urol. 30, 143-148 (2012).
[0129] 25. Lindstrom, L. S. et al. Familial concordance in cancer survival: a Swedish population-based study. Lancet Oncol. 8, 1001-1006 (2007).
[0130] 26. Al Olama, A. A. et al. A meta-analysis of 87,040 individuals identifies 23 new susceptibility loci for prostate cancer. Nat. Genet. 46, 1103-1109 (2014).
[0131] 27. Liu, W. et al. Copy number analysis indicates monoclonal origin of lethal metastatic prostate cancer. Nat. Med. 15, 559-65 (2009).
[0132] 28. Aryee, M. J. et al. DNA Methylation Alterations Exhibit Intraindividual Stability and Interindividual Heterogeneity in Prostate Cancer Metastases. Sci. Transl. Med. 5, 169ra10 (2013).
[0133] 29. Mazor, T. et al. DNA Methylation and Somatic Mutations Converge on the Cell Cycle and Define Similar Evolutionary Histories in Brain Tumors Article DNA Methylation and Somatic Mutations Converge on the Cell Cycle and Define Similar Evolutionary Histories in Brain. Cancer Cell 28, 307-317 (2015).
[0134] 30. Sturm, D. et al. Hotspot Mutations in H3F3A and IDH1 Define Distinct Epigenetic and Biological Subgroups of Glioblastoma. Cancer Cell 22, 425-437 (2012).
[0135] 31. Feber, A. et al. Using high-density DNA methylation arrays to profile copy number alterations. Genome Biol. 15, R30 (2014).
[0136] 32. Kim, T. et al. Functional genomic analysis of chromosomal aberrations in a compendium of 8000 cancer genomes. Genome Res. 23, 217-227 (2013).
[0137] 33. Boutros, P. C. et al. Spatial genomic heterogeneity within localized, multifocal prostate cancer. Nat. Genet. 47, 736-745 (2015).
[0138] 34. Pereira, V., Waxman, D. & Eyre-Walker, A. A problem with the correlation coefficient as a measure of gene expression divergence. Genetics 183, 1597-1600 (2009).
[0139] 35. Friedman, J., Hastie, T. & Tibshirani, R. Regularization Paths for Generelized Linear Models via Coordinate Descent. J. Stat. Softw. 33, 1-22 (2010).
[0140] 36. Hambrock, T. et al. Prospective assessment of prostate cancer aggressiveness using 3-T diffusion-weighted magnetic resonance imaging-guided biopsies versus a systematic 10-core transrectal ultrasound prostate biopsy cohort. Eur. Urol. 61, 177-184 (2012).
[0141] 37. Pokorny, M. R. et al. Prospective study of diagnostic accuracy comparing prostate cancer detection by transrectal ultrasound-guided biopsy versus magnetic resonance (MR) imaging with subsequent mr-guided biopsy in men without previous prostate biopsies. Eur. Urol. 66, 22-29 (2014).
[0142] 38. Ukimura, O. & Gill, I. S. Targeted prostate biopsies for a histogram of the index lesion. Curr. Opin. Urol. 23, 118-22 (2013).
[0143] 39. Baco, E. et al. Magnetic Resonance Imaging—Transectal Ultrasound Image-fusion Biopsies Accurately Characterize the Index Tumor: Correlation with Step-sectioned Radical Prostatectomy Specimens in 135 Patients. Eur. Urol. 67, 787-794 (2015).
[0144] 40. Thompson, I. et al. Guideline for the management of clinically localized prostate cancer: 2007 update. J. Urol. 177, 2106-2131 (2007).
[0145] 41. Washington, S. L., Bonham, M., Whitson, J. M., Cowan, J. E. & Carroll, P. R. Transrectal ultrasonography-guided biopsy does not reliably identify dominant cancer location in men with low-risk prostate cancer. BJU Int 110, 50-55 (2012).
[0146] 42. Campan, M., Weisenberger, D. J., Trinh, B. & Laird, P. W. MethyLight. Methods Mol. Biol. 507, 325-337 (2009).
[0147] 43. Bibikova, M. et al. High density DNA methylation array with single CpG site resolution. Genomics 98, 288-295 (2011).
[0148] 44. Triche, T. J., Weisenberger, D. J., Van Den Berg, D., Laird, P. W. & Siegmund, K. D. Low-level processing of Illumina Infinium DNA Methylation BeadArrays. Nucleic Acids Res. 41, 1-11 (2013).
[0149] 45. Lowe, R. & Rakyan, V. K. Marmal-aid—a database for Infinium HumanMethylation450. BMC Bioinformatics 14, 359 (2013).
[0150] 46. Morris, T. J. et al. ChAMP: 450k Chip Analysis Methylation Pipeline. Bioinformatics 30, 428-30 (2014).
[0151] 47. Desper, R. & Gascuel, O. Fast and Accurate Phylogeny Reconstruction Algorithms Based on the Minimum-Evolution Principle. J. Comput. Biol. 9, 687-705 (2002).
[0152] 48. Quail D F, Joyce J A: Microenvironmental regulation of tumor progression and metastasis. Nat Med 2013, 19:1423-1437.
[0153] 49. Damiano R, Di Lorenzo G, Cantiello F, De Sio M, Perdona S, D'Armiento M, Autorino R: Clinicopathologic features of prostate adenocarcinoma incidentally discovered at the time of radical cystectomy: an evidence-based analysis. Eur Urol 2007, 52:648-657.
[0154] 50. Gakis G, Schilling D, Bedke J, Sievert K D, Stenzl A: Incidental prostate cancer at radical cystoprostatectomy: implications for apex-sparing surgery. BJU Int 2010, 105:468-471.
[0155] 51. Cancer Genome Atlas Research Network. Electronic address scmo, Cancer Genome Atlas Research N: The Molecular Taxonomy of Primary Prostate Cancer. Cell 2015, 163:1011-1025.
[0156] 52. Hernandez H G, Tse M Y, Pang S C, Arboleda H, Forero D A: Optimizing methodologies for PCR-based DNA methylation analysis. Biotechniques 2013, 55:181-197.
[0157] 53. Haldrup C, Mundbjerg K, Vestergaard E M, Lamy P, Wild P, Schulz W A, Arsov C, Visakorpi T, Bone M, Hoyer S, et al: DNA methylation signatures for prediction of biochemical recurrence after radical prostatectomy of clinically localized prostate cancer. J Clin Oncol 2013, 31:3250-3258.
[0158] 54. Kumar A, Coleman I, Morrissey C, Zhang X, True L D, Gulati R, Etzioni R, Bolouri H, Montgomery B, White T, et al: Substantial interindividual and limited intraindividual genomic diversity among tumors from men with metastatic prostate cancer. Nat Med 2016, 22:369-378.

The application's sequence listing, which the Patent Office published only in electronic form, follows.

SEQUENCE LISTING (2797 sequences)

SEQ ID NO: 1 - DNA, 50 bp, Artificial Sequence
  Synthetic oligonucleotide
cggccgcacctcactaccgacctaaagatgcgcctttgctaggcggcagc

SEQ ID NO: 2 - DNA, 50 bp, Artificial Sequence
  Synthetic oligonucleotide
cttcctatttagcaggaccgcagggttggcagacagcagggcctgggccg

SEQ ID NO: 3 - DNA, 50 bp, Artificial Sequence
  Synthetic oligonucleotide
gccaacctcgtttttgtggtttctgtctcttggtgagatctagggtaacg

SEQ ID NO: 4 - DNA, 50 bp, Artificial Sequence
  Synthetic oligonucleotide
gtaattcaccaatcacatcgttggactcttcagccaatggttttgttgcg

SEQ ID NO: 5 - DNA, 50 bp, Artificial Sequence
  Synthetic oligonucleotide
cctttactactaaatgcttctcctttcaaaagtcaggggcatggggatcg

SEQ ID NO: 6 - DNA, 50 bp, Artificial Sequence
  Synthetic oligonucleotide
gagggcaccatgggagctggctctcttgctattcataaagcggggaggcg

SEQ ID NO: 7 - DNA, 50 bp, Artificial Sequence
  Synthetic oligonucleotide
ggggcgcagagctgggaggtctggctccgcgggcggttggtggcgacccg

SEQ ID NO: 8 - DNA, 50 bp, Artificial Sequence
  Synthetic oligonucleotide
cactggcacactgaggtaatcgaaaagatcaaacctatcctcgtcgatcg

SEQ ID NO: 9 - DNA, 50 bp, Artificial Sequence
  Synthetic oligonucleotide
ggccccttctttatgcagcccgtttgaaatggtctcttgagcccagtgcg

SEQ ID NO: 10 - DNA, 50 bp, Artificial Sequence
  Synthetic oligonucleotide
tgcccacccacctggagtccagaaagatgagcttcatgtccaggctggcg

SEQ ID NO: 11 - DNA, 50 bp, Artificial Sequence
  Synthetic oligonucleotide
tctcatcgtctcagtggcatttttcctagggctgttccgagagaacagcg

SEQ ID NO: 12 - DNA, 50 bp, Artificial Sequence
  Synthetic oligonucleotide
tgttagaaaattgtgccatctacccgctatgctgagtactgtcacactcg

SEQ ID NO: 13 - DNA, 50 bp, Artificial Sequence
  Synthetic oligonucleotide
cgggtcctaaaggggagagctgagcagccacttcagggattgcactccga

SEQ ID NO: 14 - DNA, 50 bp, Artificial Sequence
  Synthetic oligonucleotide
cgtgcccagttgtacccttcccgcgcagcgctcaggagcgacaaacctgg

SEQ ID NO: 15 - DNA, 50 bp, Artificial Sequence
  Synthetic oligonucleotide
cgctggctctgcagcccagctcaaaagcccatcctccaggccacttcccc

SEQ ID NO: 16 - DNA, 50 bp, Artificial Sequence
  Synthetic oligonucleotide
gagtggggattctggggcgggactctttgaagtcctaggtgacctctccg

SEQ ID NO: 17 - DNA, 50 bp, Artificial Sequence
  Synthetic oligonucleotide
tgtggcgcctgccattggccaggggaggcagacggcgctctgattggccg

SEQ ID NO: 18 - DNA, 50 bp, Artificial Sequence
  Synthetic oligonucleotide
ttggtgtgtgtgtgcaacacaacaatttgtcagctgctgttcacaatgcg

SEQ ID NO: 19 - DNA, 50 bp, Artificial Sequence
  Synthetic oligonucleotide
cgggctgcaggggcctagcccaacgccgcctcttcacattcacccaccca

SEQ ID NO: 20 - DNA, 50 bp, Artificial Sequence
  Synthetic oligonucleotide
cgggccagtttctgggatcttgaagtgtctttgctgctccctctgatcac

SEQ ID NO: 21 - DNA, 50 bp, Artificial Sequence
  Synthetic oligonucleotide
cgccagaattcagacacacaggggcatttttggtggaaaccacagaagct

SEQ ID NO: 22 - DNA, 50 bp, Artificial Sequence
  Synthetic oligonucleotide
gtcaaatgtcttctcgccctgggctttttgttccctaaaatgaaacttcg

SEQ ID NO: 23 - DNA, 50 bp, Artificial Sequence
  Synthetic oligonucleotide
cgggcctgtgcctcagactccgccacccagccacgttaaggtgacttggg

SEQ ID NO: 24 - DNA, 50 bp, Artificial Sequence
  Synthetic oligonucleotide
cgcacgtgggtgcacatgtgtatgtgagtttgagatagaaaaatgggaag

SEQ ID NO: 25 - DNA, 50 bp, Artificial Sequence
  Synthetic oligonucleotide
cgcatcaaggttctctggcactcagctcatccagcagtttgtctcctgcc

SEQ ID NO: 26 - DNA, 50 bp, Artificial Sequence
  Synthetic oligonucleotide
gaagtgcctggaggtccactgattttccaggcaccctttcccgagaagcg

SEQ ID NO: 27 - DNA, 50 bp, Artificial Sequence
  Synthetic oligonucleotide
cggcttaggtcccactgtacagatgggaaaaccgaggcctagagagggag

SEQ ID NO: 28 - DNA, 50 bp, Artificial Sequence
  Synthetic oligonucleotide
cgctgccccggccccacggccggtctcactcgactgtgagtacacagcgc

SEQ ID NO: 29 - DNA, 50 bp, Artificial Sequence
  Synthetic oligonucleotide
cgctccaccaaggggcactgctgtcagacagccaggtagcaagtctgtgg

SEQ ID NO: 30 - DNA, 50 bp, Artificial Sequence
  Synthetic oligonucleotide
gcaaaccttacaggagtggttcttactaaaattcacacgcaaagtacacg

SEQ ID NO: 31 - DNA, 50 bp, Artificial Sequence
  Synthetic oligonucleotide
ccttctgggactctctgatgggccacacaccgagcagctgctatttatcg

SEQ ID NO: 32 - DNA, 50 bp, Artificial Sequence
  Synthetic oligonucleotide
cggcccccagaccctgcctgggacgccccccaactaactccctgctggga

SEQ ID NO: 33 - DNA, 50 bp, Artificial Sequence
  Synthetic oligonucleotide
tggcaggaaatcccctcgcctgggcgcagacgtggggcgtgaacggtgcg

SEQ ID NO: 34 - DNA, 50 bp, Artificial Sequence
  Synthetic oligonucleotide
atcacaagagggtcgctgcgtgggaaagatccacctccctcggggaaccg

SEQ ID NO: 35 - DNA, 50 bp, Artificial Sequence
  Synthetic oligonucleotide
cgccctgtcctgcacccaaaggaaagggctcccctggcactctcagaaaa

SEQ ID NO: 36 - DNA, 50 bp, Artificial Sequence
  Synthetic oligonucleotide
taagaacaggattcagactcaagtctttttgaccacaaagtagtacatcg

SEQ ID NO: 37 - DNA, 50 bp, Artificial Sequence
  Synthetic oligonucleotide
cggcgggacaggaccttaacccctgggacgaacaccagctccgcaaagga

SEQ ID NO: 38 - DNA, 50 bp, Artificial Sequence
  Synthetic oligonucleotide
gcatttaagagaatggcaagaaggcatagggcgatccaggcctcgctccg

SEQ ID NO: 39 - DNA, 50 bp, Artificial Sequence
  Synthetic oligonucleotide
ctgcaaacagtaagattagagaccactggtagccaatctaatagtccacg

SEQ ID NO: 40 - DNA, 50 bp, Artificial Sequence
  Synthetic oligonucleotide
cgcccgcccgcccagcctcccccgggatggatctggagagaaagaaagtt

SEQ ID NO: 41 - DNA, 50 bp, Artificial Sequence
  Synthetic oligonucleotide
aagctcaagagaagccccaagctaaattacccctggctcagaagggtgcg

SEQ ID NO: 42 - DNA, 50 bp, Artificial Sequence
  Synthetic oligonucleotide
cggtgtaggctaattttggagggagttccacattattatcaatttttttt

SEQ ID NO: 43 - DNA, 50 bp, Artificial Sequence
  Synthetic oligonucleotide
cgagcagcatttttgctggaatgcttggtgtaagatcagtggcattaaaa

SEQ ID NO: 44 - DNA, 50 bp, Artificial Sequence
  Synthetic oligonucleotide
cggctagattgctagccttggctgctccattggcctgccttgccccttac

SEQ ID NO: 45 - DNA, 50 bp, Artificial Sequence
  Synthetic oligonucleotide
cgctcttgttctggcccccactcctgcaggccacgctgcggatggttcag

SEQ ID NO: 46 - DNA, 50 bp, Artificial Sequence
  Synthetic oligonucleotide
agggcggtgagatctacaggagaactcagggcggatgtctgccgggtgcg

SEQ ID NO: 47 - DNA, 50 bp, Artificial Sequence
  Synthetic oligonucleotide
caaatttctcagtccccaagcaggccacggggactgcagcaaacagagcg

SEQ ID NO: 48 - DNA, 50 bp, Artificial Sequence
  Synthetic oligonucleotide
cgaactgctccatggagcgcgcgtctctgcaagccaggagaaaagaccct

SEQ ID NO: 49 - DNA, 50 bp, Artificial Sequence
  Synthetic oligonucleotide
cgacgccccttgcactgagccctccatccattttagtgctggaaatgggg

SEQ ID NO: 50 - DNA, 50 bp, Artificial Sequence
  Synthetic oligonucleotide
ggggggcggggttcttcgtattaacgattgcccgtggtcctcagcttgcg

SEQ ID NO: 51 - DNA, 50 bp, Artificial Sequence
  Synthetic oligonucleotide
cggacattctttaagaaggtgctttgtatgtctgagacatcacaagcatt

SEQ ID NO: 52 - DNA, 50 bp, Artificial Sequence
  Synthetic oligonucleotide
cgaggttggcgactgttttatccagaaggaaactatgcccaacaggaacg

SEQ ID NO: 53 - DNA, 50 bp, Artificial Sequence
  Synthetic oligonucleotide
aatcgacacaggaagccagaggagtggcgcgcaaccagtggggagtgtcg

SEQ ID NO: 54 - DNA, 50 bp, Artificial Sequence
  Synthetic oligonucleotide
cggaatgctcaagtctgtcaccacacagctgtcagccaagggaggtgcag

SEQ ID NO: 55 - DNA, 50 bp, Artificial Sequence
  Synthetic oligonucleotide
cgcccagtaagttacggaaaaggcggagacagaggtttcgttcccgcccc

SEQ ID NO: 56 - DNA, 50 bp, Artificial Sequence
  Synthetic oligonucleotide
ttcaaccacacagctttgattttgtctttccattttcagtaatgaagtcg

SEQ ID NO: 57 - DNA, 50 bp, Artificial Sequence
  Synthetic oligonucleotide
gatctaaaaggattggtgtggaggccagagggctccggtccccgcgctcg

SEQ ID NO: 58 - DNA, 50 bp, Artificial Sequence
  Synthetic oligonucleotide
cgctgctataaaaggggtcccgcgcgacttccaaactcagcgccaacccg

SEQ ID NO: 59 - DNA, 50 bp, Artificial Sequence
  Synthetic oligonucleotide
cgccggggcctccttaaaacacagcgcactcgaagcgcagactgctgcgc

SEQ ID NO: 60 - DNA, 50 bp, Artificial Sequence
  Synthetic oligonucleotide
cgcagctcctcaccccgcctgctccgcagcgggaccgcgtagacctcagc

SEQ ID NO: 61 - DNA, 50 bp, Artificial Sequence
  Synthetic oligonucleotide
ttgcgttgcccacaagcttgtagtcagaagaactcgcctgggagggatcg

SEQ ID NO: 62 - DNA, 50 bp, Artificial Sequence
  Synthetic oligonucleotide
cgcttaagctggtagaccctatgagtgtgtggcattaggcatccccagcc

SEQ ID NO: 63 - DNA, 50 bp, Artificial Sequence
  Synthetic oligonucleotide
cgggcggcgctggtcacaccctcgttgctctcactcagggcccccactcc

SEQ ID NO: 64 - DNA, 50 bp, Artificial Sequence
  Synthetic oligonucleotide
cttgagtgagccctgtgacgcctgctaggtgaggtggcagccagtgagcg

SEQ ID NO: 65 - DNA, 50 bp, Artificial Sequence
  Synthetic oligonucleotide
atgcctggcccaaagcaggggtgcaggcagcttagggatgacgagtgtcg

SEQ ID NO: 66 - DNA, 50 bp, Artificial Sequence
  Synthetic oligonucleotide
gtcgaggtgtctcgcggctcctaatgtggctgtctggctgcgtcgggacg

SEQ ID NO: 67 - DNA, 50 bp, Artificial Sequence
  Synthetic oligonucleotide
taggctcctttgtggagacctgatttgagcactggtgtgaaaaagacccg

SEQ ID NO: 68 - DNA, 50 bp, Artificial Sequence
  Synthetic oligonucleotide
cgccccttcaggcgacatagacccagctgacaacgggacacacatgtccc

SEQ ID NO: 69 - DNA, 50 bp, Artificial Sequence
  Synthetic oligonucleotide
ctttcagaattctctcctggtggctccctctttcccttgggaaatcttcg

SEQ ID NO: 70 - DNA, 50 bp, Artificial Sequence
  Synthetic oligonucleotide
cgtcctcaagcactcagcacagtggtgtgtcaagacgggctgcccaatcc

SEQ ID NO: 71 - DNA, 50 bp, Artificial Sequence
  Synthetic oligonucleotide
gggaggacccggacgggagcaggttcccttcgcgcctctctggagggtcg

SEQ ID NO: 72 - DNA, 50 bp, Artificial Sequence
  Synthetic oligonucleotide
gggagtcgggggctaagggctcgagccaggaggccccggagcagcagccg

SEQ ID NO: 73 - DNA, 50 bp, Artificial Sequence
  Synthetic oligonucleotide
cgcacggagcttgctctggccatctctgtccctgcctgtgccatggacat

SEQ ID NO: 74 - DNA, 50 bp, Artificial Sequence
  Synthetic oligonucleotide
tccacgaggcgttcggacactttttcccggcctgacagcagagaaagtcg

SEQ ID NO: 75 - DNA, 50 bp, Artificial Sequence
  Synthetic oligonucleotide
cagggcggtcgaaagagccttgggggcacatctcggggtgcggtgacccg

SEQ ID NO: 76 - DNA, 50 bp, Artificial Sequence
  Synthetic oligonucleotide
gagtattctgcttttaataagcttcccaatcagctctcgagtgcaaagcg

SEQ ID NO: 77 - DNA, 50 bp, Artificial Sequence
  Synthetic oligonucleotide
cggggcccccaggcacccggcccgcacgcaaaccctcagcccggggcccc

SEQ ID NO: 78 - DNA, 50 bp, Artificial Sequence
  Synthetic oligonucleotide
tacaatggcaaaatgcactgttgagaaccctttgaagttgggcaaccacg

SEQ ID NO: 79 - DNA, 50 bp, Artificial Sequence
  Synthetic oligonucleotide
gctggggcgaagatgagtccaggggttgggttgagagcgctgcgcagccg

SEQ ID NO: 80 - DNA, 50 bp, Artificial Sequence
  Synthetic oligonucleotide
gggcctgggtggaaaccaggaggacggattgccgcctggggcgctcgccg

SEQ ID NO: 81 - DNA, 50 bp, Artificial Sequence
  Synthetic oligonucleotide
ggctttctgccagctggggacacaagatataactttcatgcccagctccg

SEQ ID NO: 82 - DNA, 50 bp, Artificial Sequence
  Synthetic oligonucleotide
cgatgcccaccagccttaccgatttaggtaaaggagtaaataaattggca

SEQ ID NO: 83 - DNA, 50 bp, Artificial Sequence
  Synthetic oligonucleotide
cttgaggatgcctgaggtccacgtgaccaactaggatcttctggcattcg

SEQ ID NO: 84 - DNA, 50 bp, Artificial Sequence
  Synthetic oligonucleotide
ggcttcttcttcttggggggcgtccggttctgataggggtgacctatacg

SEQ ID NO: 85 - DNA, 50 bp, Artificial Sequence
  Synthetic oligonucleotide
gccactttcggggagcgcagagcgcggcgcggggaggcgaggctggagcg

SEQ ID NO: 86 - DNA, 50 bp, Artificial Sequence
  Synthetic oligonucleotide
cgcagctgcaggggcgcagagcaccctctatccaagctgacaaccatcag

SEQ ID NO: 87 - DNA, 50 bp, Artificial Sequence
  Synthetic oligonucleotide
cgggatgtaaaagtgtggaaaacttatttcccacgcagaacccttggtcc

SEQ ID NO: 88 - DNA, 50 bp, Artificial Sequence
  Synthetic oligonucleotide
cgagttgatatttaattagtgaatgcacagttgctttgtggaccttaata

SEQ ID NO: 89 - DNA, 50 bp, Artificial Sequence
  Synthetic oligonucleotide
cgtgggaagaagcaccacattcctgtggtcttggttgactgctgaaatgc

SEQ ID NO: 90 - DNA, 50 bp, Artificial Sequence
  Synthetic oligonucleotide
ggcggtaggaactgaaatcgatcacagctcgttagagtacgtcactgtcg

SEQ ID NO: 91 - DNA, 50 bp, Artificial Sequence
  Synthetic oligonucleotide
ggggtaaaagctcctggccagggctgcctggagctgccccttccactccg

SEQ ID NO: 92 - DNA, 50 bp, Artificial Sequence
  Synthetic oligonucleotide
aaccaaggagaccaaaaccagaattctcaaatctaaagtggtttaggccg

SEQ ID NO: 93 - DNA, 50 bp, Artificial Sequence
  Synthetic oligonucleotide
cggcaaattgggggtgacgttcaagatgtacttgatgccgaattcctcca

SEQ ID NO: 94 - DNA, 50 bp, Artificial Sequence
  Synthetic oligonucleotide
cgcgtcaactgaaatattcaggttctcacattgggactgactaggcaaac

SEQ ID NO: 95 - DNA, 50 bp, Artificial Sequence
  Synthetic oligonucleotide
cgccttaccctgttaaccagaacagccattgcatattccgttctgggtta

SEQ ID NO: 96 - DNA, 50 bp, Artificial Sequence
  Synthetic oligonucleotide
gtggcagataagacacgagagggagctctggtccccgaggggctgtcccg

SEQ ID NO: 97 - DNA, 50 bp, Artificial Sequence
  Synthetic oligonucleotide
cggctacagaagcagattttgagggtggaattagaacacttaaacacagg

SEQ ID NO: 98 - DNA, 50 bp, Artificial Sequence
  Synthetic oligonucleotide
cgcagcgtttccggcacccagccaggcttaaaggtactgtgaggggaact

SEQ ID NO: 99 - DNA, 50 bp, Artificial Sequence
  Synthetic oligonucleotide
cgcccgccaagcaagtagcagcttcaaagccctgccctcgctctcgcatg

SEQ ID NO: 100 - DNA, 50 bp, Artificial Sequence
  Synthetic oligonucleotide
ccctgaggggcggggcgggagctggcgctagaaatgcgccggggcctgcg

SEQ ID NO: 101 - DNA, 50 bp, Artificial Sequence
  Synthetic oligonucleotide
cggcctctatggaagtctgcactctgcttgctgtggtcagactccaggga

SEQ ID NO: 102 - DNA, 50 bp, Artificial Sequence
  Synthetic oligonucleotide
ggatttagcgccccggctattggccaggaggtggctgggttcaaggaccg

SEQ ID NO: 103 - DNA, 50 bp, Artificial Sequence
  Synthetic oligonucleotide
gaggtgcaacggaagccagaacattcctcctggaaattcaacctgtttcg

SEQ ID NO: 104 - DNA, 50 bp, Artificial Sequence
  Synthetic oligonucleotide
tgccagtgtccaataaaaccagtcaggtctcacatattatgtagttaacg

SEQ ID NO: 105 - DNA, 50 bp, Artificial Sequence
  Synthetic oligonucleotide
cgaaccctccaactgggatcggtctggttcagtgtttgttttctaagcag

SEQ ID NO: 106 - DNA, 50 bp, Artificial Sequence
  Synthetic oligonucleotide
gggtaggtgccggcagagaacttgtgcgtcttgcccgccttgccttgccg

SEQ ID NO: 107 - DNA, 50 bp, Artificial Sequence
  Synthetic oligonucleotide
ctcaggtgtctcaggcccacggaggatttaatagatgaaaccctggatcg

SEQ ID NO: 108 - DNA, 50 bp, Artificial Sequence
  Synthetic oligonucleotide
cgcttcggtaaggaatgaaaagaaaaacacttcccaaggcccggcacttt

SEQ ID NO: 109 - DNA, 50 bp, Artificial Sequence
  Synthetic oligonucleotide
cgcaggcagccgtggacacgatcgggtttcctgtgccagtcaattacatg

SEQ ID NO: 110 - DNA, 50 bp, Artificial Sequence
  Synthetic oligonucleotide
cggtcaagacacaggaacagccgtactttcctgcgggtaagaggcttttc

SEQ ID NO: 111 - DNA, 50 bp, Artificial Sequence
  Synthetic oligonucleotide
cgcacccccggaccagacgctgctccgcgtgtaatattcataagaaacat

SEQ ID NO: 112 - DNA, 50 bp, Artificial Sequence
  Synthetic oligonucleotide
gcacgtaatttcgcagtcttctgtcctatcctcatgttacagcaccgacg

SEQ ID NO: 113 - DNA, 50 bp, Artificial Sequence
  Synthetic oligonucleotide
cgggtcaagccccactagaagttaacacctgtggtctccaaacttgccta

SEQ ID NO: 114 - DNA, 50 bp, Artificial Sequence
  Synthetic oligonucleotide
cgtccaataagaagagccccagcttgacacctgcctatatacaggcgagc

SEQ ID NO: 115 - DNA, 50 bp, Artificial Sequence
  Synthetic oligonucleotide
ccaggagagcagcagcgggagcgcaaggctccagggcagaggcattctcg

SEQ ID NO: 116 - DNA, 50 bp, Artificial Sequence
  Synthetic oligonucleotide
cgggccggttcgaaccgctcccttaacccttaagcaaccaggacgctccc

SEQ ID NO: 117 - DNA, 50 bp, Artificial Sequence
  Synthetic oligonucleotide
cgggagggcaaaagaccacagagatctgcgaagccaaagtaaacaacggg

SEQ ID NO: 118 - DNA, 50 bp, Artificial Sequence
  Synthetic oligonucleotide
ccaggggcgcagcggtgtgcgcatagtagggtgggaacccgatggcaacg

SEQ ID NO: 119 - DNA, 50 bp, Artificial Sequence
  Synthetic oligonucleotide
cgcccccaccccccggctccgcccggggccacttgttgctttctttgcag

SEQ ID NO: 120 - DNA, 50 bp, Artificial Sequence
  Synthetic oligonucleotide
ctgaagcatcactcacaactccactttctttacttaaataaggatttccg

SEQ ID NO: 121 - DNA, 50 bp, Artificial Sequence
  Synthetic oligonucleotide
cgcaatccccaatccgctgcagcccacaaacccagagagccagagagccc

SEQ ID NO: 122 - DNA, 50 bp, Artificial Sequence
  Synthetic oligonucleotide
cacacggggacggagctgggctggcagcggtgcccaggacagagtgggcg

SEQ ID NO: 123 - DNA, 50 bp, Artificial Sequence
  Synthetic oligonucleotide
cgcgcacgatagtcccaacgcgggcctgtctcacctggacttccttcccg

SEQ ID NO: 124 - DNA, 50 bp, Artificial Sequence
  Synthetic oligonucleotide
ctgtgaattccacccaccgggcatgggaaagtgcggcattcccagtcccg

SEQ ID NO: 125 - DNA, 50 bp, Artificial Sequence
  Synthetic oligonucleotide
ctgttggcttcttatcactgacagcggagaaagactgatgggccttggcg

SEQ ID NO: 126 - DNA, 50 bp, Artificial Sequence
  Synthetic oligonucleotide
cgagctactcattagagtttaatttcctcgagccaagtccctggagacgg

SEQ ID NO: 127 - DNA, 50 bp, Artificial Sequence
  Synthetic oligonucleotide
ctggagtcccacaggagctcttcagctggtagccctggaaaaactggacg

SEQ ID NO: 128 - DNA, 50 bp, Artificial Sequence
  Synthetic oligonucleotide
cggctacctggagggcctcctgccaccggcccgcagcctggtagaacttg

SEQ ID NO: 129 - DNA, 50 bp, Artificial Sequence
  Synthetic oligonucleotide
gaggctgcactcacgaggtccgagtggaagggcttcgcgttggaggtgcg

SEQ ID NO: 130 - DNA, 50 bp, Artificial Sequence
  Synthetic oligonucleotide
cgggcacttccaggccccataggtctgtagctctgtccagcgagttcaag

SEQ ID NO: 131 - DNA, 50 bp, Artificial Sequence
  Synthetic oligonucleotide
gaggatgaccctgtattcctgggttagtcaaggtcagcttgccagagacg

SEQ ID NO: 132 - DNA, 50 bp, Artificial Sequence
  Synthetic oligonucleotide
gtagagagtaaccagcaccagcttcacaggaatggcatgaccttgatacg

SEQ ID NO: 133 - DNA, 50 bp, Artificial Sequence
  Synthetic oligonucleotide
ttaaacttcattagacactgaaacttggaatatgattccatgattctccg

SEQ ID NO: 134 - DNA, 50 bp, Artificial Sequence
  Synthetic oligonucleotide
ctatttcacttaacgccgcttttatttcgttttcgttccaataatgctcg

SEQ ID NO: 135 - DNA, 50 bp, Artificial Sequence
  Synthetic oligonucleotide
gtaatttaattttctctcccgaaagcgttgctaattaaatcctttctccg

SEQ ID NO: 136 - DNA, 50 bp, Artificial Sequence
  Synthetic oligonucleotide
cgcctccatgcagccacgaccaccgccctgagccggccgcagcgccacct

SEQ ID NO: 137 - DNA, 50 bp, Artificial Sequence
  Synthetic oligonucleotide
cgcggcttgggtttcaacgcactttggcgcctgacagagtcgcatctcct

SEQ ID NO: 138 - DNA, 50 bp, Artificial Sequence
  Synthetic oligonucleotide
cgcccggcctgtagctccccccacggcccagacgcagggaactcccctcc

SEQ ID NO: 139 - DNA, 50 bp, Artificial Sequence
  Synthetic oligonucleotide
cgctgactcaggagacttcggagtgtaggctgtctagttcagtggttagg

SEQ ID NO: 140 - DNA, 50 bp, Artificial Sequence
  Synthetic oligonucleotide
aggccagacctgcaggcatgagaggcacaggcaacccgcctgtacggccg

SEQ ID NO: 141 - DNA, 50 bp, Artificial Sequence
  Synthetic oligonucleotide
aggcctcctgctgcaactgcaggaggatgcggttcgcttgctgcctctcg

SEQ ID NO: 142 - DNA, 50 bp, Artificial Sequence
  Synthetic oligonucleotide
gcactgcaccaattcacacatggatacagacttccaacaaatgactatcg

SEQ ID NO: 143 - DNA, 50 bp, Artificial Sequence
  Synthetic oligonucleotide
cctgtccacctggaaggctgcccgctctccctgagggtcctgggaaggcg

SEQ ID NO: 144 - DNA, 50 bp, Artificial Sequence
  Synthetic oligonucleotide
cgtcacagctacctgtctctggggatccctagtataacacattcagtgtt

SEQ ID NO: 145 - DNA, 50 bp, Artificial Sequence
  Synthetic oligonucleotide
aagtggggggcaggggctgtgcgcggctctctcccctaaagcgaggttcg

SEQ ID NO: 146 - DNA, 50 bp, Artificial Sequence
  Synthetic oligonucleotide
ttgggggctgggtcacgggatgaaccggggggtgggtcacgggatgaacg

SEQ ID NO: 147 - DNA, 50 bp, Artificial Sequence
  Synthetic oligonucleotide
ccaggcgactgggagaaatttggagacctgtcagagtggtcagacacccg

SEQ ID NO: 148 - DNA, 50 bp, Artificial Sequence
  Synthetic oligonucleotide
cgggtaaatcggcagcgagacagccccctgcaaataatgctggcattccc

SEQ ID NO: 149 - DNA, 50 bp, Artificial Sequence
  Synthetic oligonucleotide
tgggcgtaacggggcggcggcgtaacgtgtggctctgtggttagggcacg

SEQ ID NO: 150 - DNA, 50 bp, Artificial Sequence
  Synthetic oligonucleotide
cgccccagtgagggtgatcgtattctcctaaggagagctttattgctggg

SEQ ID NO: 151 - DNA, 50 bp, Artificial Sequence
  Synthetic oligonucleotide
cggccagattcccccacccgcccccagcgtcagctgacgtcacaatcggc

SEQ ID NO: 152 - DNA, 50 bp, Artificial Sequence
  Synthetic oligonucleotide
ctgatgggggtccactgggacttacatttacacagagctcgctggtaccg

SEQ ID NO: 153 - DNA, 50 bp, Artificial Sequence
  Synthetic oligonucleotide
cggcagagttcgcgggcttagcagacccgcccattggctcttgcatctcc

SEQ ID NO: 154 - DNA, 50 bp, Artificial Sequence
  Synthetic oligonucleotide
tctttataaagggccgccttggggcgcgaaaagttcgtgaggtgtagtcg

SEQ ID NO: 155 - DNA, 50 bp, Artificial Sequence
  Synthetic oligonucleotide
cgcaagggggctgaagagccaaatggggaaactgatggagcctcacaagt

SEQ ID NO: 156 - DNA, 50 bp, Artificial Sequence
  Synthetic oligonucleotide
cgcctgtcgacgagatgctattaaccagtttttgctctgcccctgtcatg

SEQ ID NO: 157 - DNA, 50 bp, Artificial Sequence
  Synthetic oligonucleotide
ttttactctttacaatacattctttcatgcttcctagggattgagctgcg

SEQ ID NO: 158 - DNA, 50 bp, Artificial Sequence
  Synthetic oligonucleotide
cgtgcagacaacagaatggggatggaatctccttgtggcccccagctcag

SEQ ID NO: 159 - DNA, 50 bp, Artificial Sequence
  Synthetic oligonucleotide
cgctggcgtgcaacacaggcactgactcacactttgtctaaacaagcttg

SEQ ID NO: 160 - DNA, 50 bp, Artificial Sequence
  Synthetic oligonucleotide
tgcggtcggtggggcgcagggccggggagccaggggggtgccggggctcg

SEQ ID NO: 161 - DNA, 50 bp, Artificial Sequence
  Synthetic oligonucleotide
cgtggttgctcgactgttgtatctgtgatacattatccgactaaggactc

SEQ ID NO: 162 - DNA, 50 bp, Artificial Sequence
  Synthetic oligonucleotide
gagcttctttgaagaccctcctcagataaactgctgagttgcaggtgtcg

SEQ ID NO: 163 - DNA, 50 bp, Artificial Sequence
  Synthetic oligonucleotide
cgtggcggtccccttgctcatctgactccggaggcaggttccgcagaaag

SEQ ID NO: 164 - DNA, 50 bp, Artificial Sequence
  Synthetic oligonucleotide
ggacacagtggccacgctgctagagtgcaagacgctcttcatcttgcgcg

SEQ ID NO: 165 - DNA, 50 bp, Artificial Sequence
  Synthetic oligonucleotide
cgcccttgttgactttcaaaaggcgccgccggccccgcgccctacacgct

SEQ ID NO: 166 - DNA, 50 bp, Artificial Sequence
  Synthetic oligonucleotide
tccacgggctccatgctggattccatatggccagctgggccgagggagcg

SEQ ID NO: 167 - DNA, 50 bp, Artificial Sequence
  Synthetic oligonucleotide
cgcccagcccttgcgccccccggtacactggccccgccgggttcccacac

SEQ ID NO: 168 - DNA, 50 bp, Artificial Sequence
  Synthetic oligonucleotide
cgcgcccttctgcacggggaccccagcccacccccgtacggacacgcctt

SEQ ID NO: 169 - DNA, 50 bp, Artificial Sequence
  Synthetic oligonucleotide
cgcaggccagcaagcttctgaaaagcaaacctaggaagtagctttccaac

SEQ ID NO: 170 - DNA, 50 bp, Artificial Sequence
  Synthetic oligonucleotide
tcgtccagttgactccaagcttgataacgcgtgtaggggccgtgaggccg

SEQ ID NO: 171 - DNA, 50 bp, Artificial Sequence
  Synthetic oligonucleotide
cgcccccagggcccggcgtcctgggcctctgactctgcccggtttgctaa

SEQ ID NO: 172 - DNA, 50 bp, Artificial Sequence
  Synthetic oligonucleotide
cgagagaatgagtagcctgagcaaagtcataggggtaagataaaacgaca

SEQ ID NO: 173 - DNA, 50 bp, Artificial Sequence
  Synthetic oligonucleotide
acagaaaaactgcccgcagctagtaaggaatcctgatgatgttactcacg

SEQ ID NO: 174 - DNA, 50 bp, Artificial Sequence
  Synthetic oligonucleotide
cgtgggcacgctgtcgcgcaccgagctgcagcttctcaaccagctgcact

SEQ ID NO: 175 - DNA, 50 bp, Artificial Sequence
  Synthetic oligonucleotide
cggtggctatcagacgaagaatgggaaaatacagatagcagacttacagt

SEQ ID NO: 176 - DNA, 50 bp, Artificial Sequence
  Synthetic oligonucleotide
aatgcgccctgactccccctggccgagagccggctcagaatgaaagagcg

SEQ ID NO: 177 - DNA, 50 bp, Artificial Sequence
  Synthetic oligonucleotide
tggaaaatctgattggatgaatcacttcatttttgaatcctctcttctcg

SEQ ID NO: 178 - DNA, 50 bp, Artificial Sequence
  Synthetic oligonucleotide
cgggataaggttagctcgtttatccaacaaatatttgcagagcccctact

SEQ ID NO: 179 - DNA, 50 bp, Artificial Sequence
  Synthetic oligonucleotide
cggactaagtgggccagactcttgtcaggggagggatcaccaggacctca

SEQ ID NO: 180 - DNA, 50 bp, Artificial Sequence
  Synthetic oligonucleotide
aggctaccaggagcaggagcagcagcgccgcccgcagtagccggggagcg

SEQ ID NO: 181 - DNA, 50 bp, Artificial Sequence
  Synthetic oligonucleotide
tagatgaggcccggcgggttcctcccctcaggctaggcggggtggcagcg

SEQ ID NO: 182 - DNA, 50 bp, Artificial Sequence
  Synthetic oligonucleotide
tctgagggaatacccgcagcagcgctaccagagcgcatttgctctatgcg

SEQ ID NO: 183 - DNA, 50 bp, Artificial Sequence
  Synthetic oligonucleotide
aacttacagtcttcagggaagggcttcctgccaactggaacagtggtgcg

SEQ ID NO: 184 - DNA, 50 bp, Artificial Sequence
  Synthetic oligonucleotide
cggcctccacccgccacaagcgcacagggctctgcccactccccgcccct

SEQ ID NO: 185 - DNA, 50 bp, Artificial Sequence
  Synthetic oligonucleotide
acctgggcgtggggacaccaccaggcaggagcagaggcaggactgggacg

SEQ ID NO: 186 - DNA, 50 bp, Artificial Sequence
  Synthetic oligonucleotide
agggcgccggcaggcggctgaggcagaacggttgggctgcggtgcctccg

SEQ ID NO: 187 - DNA, 50 bp, Artificial Sequence
  Synthetic oligonucleotide
cggagccgctgcaccaccacccctacaaatatccggccgccgcctacgac

SEQ ID NO: 188 - DNA, 50 bp, Artificial Sequence
  Synthetic oligonucleotide
cggaagtgaccaagcgcgactagatctaaagccttcccgacttccatttt

SEQ ID NO: 189 - DNA, 50 bp, Artificial Sequence
  Synthetic oligonucleotide
cggacacccagagcccagcgcgcccgccctgcgtctccgcaccaagccct

SEQ ID NO: 190 - DNA, 50 bp, Artificial Sequence
  Synthetic oligonucleotide
cgcggactccttgtccttgccggttcacctccctgtggaggacctcctct

SEQ ID NO: 191 - DNA, 50 bp, Artificial Sequence
  Synthetic oligonucleotide
cgagccaggtcagtgggcactgttgctaggtcctctatcatgttcctggg

SEQ ID NO: 192 - DNA, 50 bp, Artificial Sequence
  Synthetic oligonucleotide
tgaaatcttgcggtgttgagtaggaccgccaggccggcaagcaggaggcg

SEQ ID NO: 193 - DNA, 50 bp, Artificial Sequence
  Synthetic oligonucleotide
cgagagctgattgggaagcttattaaaagcagaatactccaggggcagtc

SEQ ID NO: 194 - DNA, 50 bp, Artificial Sequence
  Synthetic oligonucleotide
attaggtgccttcggcgtgggccggcccccactccaaaatcaggctggcg

SEQ ID NO: 195 - DNA, 50 bp, Artificial Sequence
  Synthetic oligonucleotide
cgccaggcttgctagtgaggatgggacgcagtctcaggccccacgcaatc

SEQ ID NO: 196 - DNA, 50 bp, Artificial Sequence
  Synthetic oligonucleotide
cgccgcgcgcgctctctgcccatctccggcttcgctgaagctgctacagc

SEQ ID NO: 197 - DNA, 50 bp, Artificial Sequence
  Synthetic oligonucleotide
cggtcatcaactgaaataggcaaaaccaataacgcacctcgcttttcgcc

SEQ ID NO: 198 - DNA, 50 bp, Artificial Sequence
  Synthetic oligonucleotide
taaggtgtcttcctacagacaccgctgctgctaccttgctaccttcagcg

SEQ ID NO: 199 - DNA, 50 bp, Artificial Sequence
  Synthetic oligonucleotide
ggcgtcttctgcgcatttgttgaagttacagagccctcgtcatgatcccg

SEQ ID NO: 200 - DNA, 50 bp, Artificial Sequence
  Synthetic oligonucleotide
tgggaggctggggctgggcgagactcgcgggcccgggtaggtgagcctcg

SEQ ID NO: 201 - DNA, 50 bp, Artificial Sequence
  Synthetic oligonucleotide
cgtggttccaggctcttggctggaccgggaagaccatatggcgcatgccg

SEQ ID NO: 202 - DNA, 50 bp, Artificial Sequence
  Synthetic oligonucleotide
cggtgctgtggcataattaccgtgctcgttgacttatagtctcatgattt

SEQ ID NO: 203 - DNA, 50 bp, Artificial Sequence
  Synthetic oligonucleotide
cgctctttgtaaatacagaataggacaaaacggaaagagtgatgtgctgt

SEQ ID NO: 204 - DNA, 50 bp, Artificial Sequence
  Synthetic oligonucleotide
cgccgcacagcaacccgaactttcgtttggtagcacttgaaagagttttc

SEQ ID NO: 205 - DNA, 50 bp, Artificial Sequence
  Synthetic oligonucleotide
aaccacaaacctggtagtccaaatgtgttgggctgtggccaagttgaacg

SEQ ID NO: 206 - DNA, 50 bp, Artificial Sequence
  Synthetic oligonucleotide
cgcgcccgcgtcttcatcctcagactcacggcgtcactgtcgacccgcac

SEQ ID NO: 207 - DNA, 50 bp, Artificial Sequence
  Synthetic oligonucleotide
cgcagagcccctgttgccctgggccagatggcccgtagcagcaaaaataa

SEQ ID NO: 208 - DNA, 50 bp, Artificial Sequence
  Synthetic oligonucleotide
cgccccacaagcaaaagtaattcccaaccaagcatgcgcagtgctcaggg

SEQ ID NO: 209 - DNA, 50 bp, Artificial Sequence
  Synthetic oligonucleotide
cgcagtatgacttcaagaagcagcctcatggttaagagaaaggggttctg

SEQ ID NO: 210 - DNA, 50 bp, Artificial Sequence
  Synthetic oligonucleotide
cgcggccgtcaggcagtcagggcacccacccactgtccgactccactcac

SEQ ID NO: 211 - DNA, 50 bp, Artificial Sequence
  Synthetic oligonucleotide
cgcgtggagcgtttcaacccccacgttcaccgcgccaggtgatacaagac

SEQ ID NO: 212 - DNA, 50 bp, Artificial Sequence
  Synthetic oligonucleotide
ctgccccttggagctgttgcctgggcaggggtggccttggttgtttaccg

SEQ ID NO: 213 - DNA, 50 bp, Artificial Sequence
  Synthetic oligonucleotide
aaggtcgaagagtcgttaccaaaacctttgaagccgcttttcggctctcg

SEQ ID NO: 214 - DNA, 50 bp, Artificial Sequence
  Synthetic oligonucleotide
tcgtggagcacggcgcttgtgtagggcagagcctgctggtcctccagccg

SEQ ID NO: 215 - DNA, 50 bp, Artificial Sequence
  Synthetic oligonucleotide
cgcccagcaccctgcctccggcgatgccgccccagcccctctgatggccc

SEQ ID NO: 216 - DNA, 50 bp, Artificial Sequence
  Synthetic oligonucleotide
gagcgcataccaaaggcagactcctttgcaggctccacgagccccattcg

SEQ ID NO: 217 - DNA, 50 bp, Artificial Sequence
  Synthetic oligonucleotide
cggtggtcagccagctccctgcattgttccggtagcgagctccacacaca

SEQ ID NO: 218 - DNA, 50 bp, Artificial Sequence
  Synthetic oligonucleotide
cgccccacagctggctcccgcgctctgcccaccgccacgccaccttcacc

SEQ ID NO: 219 - DNA, 50 bp, Artificial Sequence
  Synthetic oligonucleotide
cgctgacccaccgcagcccgcactgttttgcgaacagttcgcaaggactg

SEQ ID NO: 220 - DNA, 50 bp, Artificial Sequence
  Synthetic oligonucleotide
ctgcctctcaggggtccaggctggctggcagaggccatagtgacgtggcg

SEQ ID NO: 221 - DNA, 50 bp, Artificial Sequence
  Synthetic oligonucleotide
cggtccaggtggggaagaactgatgcagaaatgctatgtatacattaaat

SEQ ID NO: 222 - DNA, 50 bp, Artificial Sequence
  Synthetic oligonucleotide
cggccactgtccctgaagggcaagcagtcgtctaaaccttaggtccagat

SEQ ID NO: 223 - DNA, 50 bp, Artificial Sequence
  Synthetic oligonucleotide
cgcgtgtctgatacttgggatcctggcttgcgggccctcctagactctgc

SEQ ID NO: 224 - DNA, 50 bp, Artificial Sequence
  Synthetic oligonucleotide
cgccctgtcccctggccttggcttgtgagctgagcgagcagcagctgctg

SEQ ID NO: 225 - DNA, 50 bp, Artificial Sequence
  Synthetic oligonucleotide
ccgagctggtggtaaattgcatctctcgacagaggtggctgagggaagcg

SEQ ID NO: 226 - DNA, 50 bp, Artificial Sequence
  Synthetic oligonucleotide
cggaacgttctacctgttgggcttcgcagccgagctgctcacccccggcc

SEQ ID NO: 227 - DNA, 50 bp, Artificial Sequence
  Synthetic oligonucleotide
cattgcatcaagccttgagtgtgcatgataagcaggatgtatgcccttcg

SEQ ID NO: 228 - DNA, 50 bp, Artificial Sequence
  Synthetic oligonucleotide
tctatatatactcaggcctccagttgggggaagcccttggtggccaatcg

SEQ ID NO: 229 - DNA, 50 bp, Artificial Sequence
  Synthetic oligonucleotide
caagattctggggactcagtcactccaggctgtggggtctggagtggtcg

SEQ ID NO: 230 - DNA, 50 bp, Artificial Sequence
  Synthetic oligonucleotide
cggcaaaggcgctgctgcctcaagcttgctttacatgcctctctagttcc

SEQ ID NO: 231 - DNA, 50 bp, Artificial Sequence
  Synthetic oligonucleotide
cggagccccgcagtgtgcgtgcccgccgcctccagccatctgagcctccc

SEQ ID NO: 232 - DNA, 50 bp, Artificial Sequence
  Synthetic oligonucleotide
aatgtccttgaacgtcattagcaggtttcagggacctacttcgctattcg

SEQ ID NO: 233 - DNA, 50 bp, Artificial Sequence
  Synthetic oligonucleotide
cggacagttgcccactcacagcgtgcaaaggggtcgcactccctgtgggt

SEQ ID NO: 234 - DNA, 50 bp, Artificial Sequence
  Synthetic oligonucleotide
tctccgacgacagctagtttctatagtaatgtggggtgcggggattcccg

SEQ ID NO: 235 - DNA, 50 bp, Artificial Sequence
  Synthetic oligonucleotide
tggaaagccctgtgacctattcccagggacccagcagtgggctcccagcg

SEQ ID NO: 236 - DNA, 50 bp, Artificial Sequence
  Synthetic oligonucleotide
cccacagagtattcaggtgttaatcaccagctctcttttccctatgtgcg

SEQ ID NO: 237 - DNA, 50 bp, Artificial Sequence
  Synthetic oligonucleotide
ctgctggagggcccagcccctggggcctcggggtcgttcgggtcctgacg

SEQ ID NO: 238 - DNA, 50 bp, Artificial Sequence
  Synthetic oligonucleotide
gagcagggcaagtgacccatgtgtttgcctcttctacctaggagatgacg

SEQ ID NO: 239 - DNA, 50 bp, Artificial Sequence
  Synthetic oligonucleotide
gtgccgcagtaacggctgctgctcggccaggcggtaactgatgggcgccg

SEQ ID NO: 240 - DNA, 50 bp, Artificial Sequence
  Synthetic oligonucleotide
tggaagcgagtcccataccagggctcacaccctggaaggggctggttccg

SEQ ID NO: 241 - DNA, 50 bp, Artificial Sequence
  Synthetic oligonucleotide
cgccctcaagccgactcccgggccggcccctcgctgccctcccgcaacct

SEQ ID NO: 242 - DNA, 50 bp, Artificial Sequence
  Synthetic oligonucleotide
cctcgcccttcagagtaactcctgtggactctgagactctgggatattcg

SEQ ID NO: 243 - DNA, 50 bp, Artificial Sequence
  Synthetic oligonucleotide
cgcaatccttttgcaaagccaagaagtgtgtgtgttgtgtgtgtgtgtgt

SEQ ID NO: 244 - DNA, 50 bp, Artificial Sequence
  Synthetic oligonucleotide
ggaagaagatcctgccggagtctttctttaaggagcctgattcgggctcg

SEQ ID NO: 245 - DNA, 50 bp, Artificial Sequence
  Synthetic oligonucleotide
cgcgccagtcaactccgcgcacgttgcccctgcttggcagccaataaaag

SEQ ID NO: 246 - DNA, 50 bp, Artificial Sequence
  Synthetic oligonucleotide
cgagcaggcttggagactctgcctgcgtcctccacttcgtcccggccctt

SEQ ID NO: 247 - DNA, 50 bp, Artificial Sequence
  Synthetic oligonucleotide
cgcggtggaggagccggcggctcgcgtggggctcgggatcttggggaccg

SEQ ID NO: 248 - DNA, 50 bp, Artificial Sequence
  Synthetic oligonucleotide
atccatccaaacgaccccaaccaaatctgggggccaaaacgcaaagatcg

SEQ ID NO: 249 - DNA, 50 bp, Artificial Sequence
  Synthetic oligonucleotide
cgcccgcaaagacgccgcattccaaatgcagagcagatcggctgtaacag

SEQ ID NO: 250 - DNA, 50 bp, Artificial Sequence
  Synthetic oligonucleotide
cgcccgccggtaggaaggaaagaaagcaaagcacatgcaaattgaccgac

SEQ ID NO: 251 - DNA, 50 bp, Artificial Sequence
  Synthetic oligonucleotide
gacggcacggtgtttcgatcacagaccgcgtccttgagtaatttgtctcg

SEQ ID NO: 252 - DNA, 50 bp, Artificial Sequence
  Synthetic oligonucleotide
ctattatcactcactacatttcccagctatgtactgaaaaaatcagctcg

SEQ ID NO: 253 - DNA, 50 bp, Artificial Sequence
  Synthetic oligonucleotide
cggaggctgtacagtcatgctaatgagctgctggacaatggcagtttttg

SEQ ID NO: 254 - DNA, 50 bp, Artificial Sequence
  Synthetic oligonucleotide
cggagaaagccttgattaagatccaacgttcctgagctctttgccaggaa

SEQ ID NO: 255 - DNA, 50 bp, Artificial Sequence
  Synthetic oligonucleotide
cgcctggggtggagggtatgaggcaaagccccaaatagtattcataatgc

SEQ ID NO: 256 - DNA, 50 bp, Artificial Sequence
  Synthetic oligonucleotide
gaggactgtccatgagcgtacgcagctgctccgggttttcgtggcagccg

SEQ ID NO: 257 - DNA, 50 bp, Artificial Sequence
  Synthetic oligonucleotide
cggcactctcgatggagttccattttgttgcagtggtgcttcagcttaga

SEQ ID NO: 258 - DNA, 50 bp, Artificial Sequence
  Synthetic oligonucleotide
cggaccacagctccttgtcccagggccacagtggtgttcattcagtgcct

SEQ ID NO: 259 - DNA, 50 bp, Artificial Sequence
  Synthetic oligonucleotide
cggcctcatcttcgcccagccaaccccgcctggagccctatggccaactg

SEQ ID NO: 260 - DNA, 50 bp, Artificial Sequence
  Synthetic oligonucleotide
aggatctggagccaagtaatggtgatactgatgcttccttttctttgccg

SEQ ID NO: 261 - DNA, 50 bp, Artificial Sequence
  Synthetic oligonucleotide
ggagcccttcttcggggcgggagctgacttagctggttcaggcatgttcg

SEQ ID NO: 262 - DNA, 50 bp, Artificial Sequence
  Synthetic oligonucleotide
gaggggcgtggggagcttgcggcacagctagggcatcccggcgaggagcg

SEQ ID NO: 263 - DNA, 50 bp, Artificial Sequence
  Synthetic oligonucleotide
cgccccgcgtggcagaaaggagttcctcagctgctgtatctggtgggaaa

SEQ ID NO: 264 - DNA, 50 bp, Artificial Sequence
  Synthetic oligonucleotide
ggggctgtgtgcgggccgggttcctcccttaccgctttgggtgccctgcg

SEQ ID NO: 265 - DNA, 50 bp, Artificial Sequence
  Synthetic oligonucleotide
attcggattcagaaatgctttgcaactccagagctgttgagcctgcggcg

SEQ ID NO: 266 - DNA, 50 bp, Artificial Sequence
  Synthetic oligonucleotide
ctcattctggttgttttccaccgcgtctgctcccatttgcgtgggatgcg

SEQ ID NO: 267 - DNA, 50 bp, Artificial Sequence
  Synthetic oligonucleotide
aaattgtgaaatgtttcctttctgtttcaaaataggcacgacccacttcg

SEQ ID NO: 268 - DNA, 50 bp, Artificial Sequence
  Synthetic oligonucleotide
ggtcctctcttaggggcgcgccgtctcctggcttcctgtaagaaaaggcg

SEQ ID NO: 269 - DNA, 50 bp, Artificial Sequence
  Synthetic oligonucleotide
cgctggccctgtctggaatttaaagctccgtctgaattctggtgcctttt

SEQ ID NO: 270 - DNA, 50 bp, Artificial Sequence
  Synthetic oligonucleotide
gtgacggaagcgggactggagacattatgaaggctgttactgctccaccg

SEQ ID NO: 271 - DNA, 50 bp, Artificial Sequence
  Synthetic oligonucleotide
ttctgacaaatctctttggaatcctcacttcattcaaagattcaagctcg

SEQ ID NO: 272 - DNA, 50 bp, Artificial Sequence
  Synthetic oligonucleotide
ggaggacacctggaatccctccttgctcctaaaggtgtttcacggtaccg

SEQ ID NO: 273 - DNA, 50 bp, Artificial Sequence
  Synthetic oligonucleotide
cggaccagacccagccctcggagtctattttttgcctccagttaccggat

SEQ ID NO: 274 - DNA, 50 bp, Artificial Sequence
  Synthetic oligonucleotide
cgccgcacaagccccggctttgtgttgctaagcgattagagcagatgtaa

SEQ ID NO: 275 - DNA, 50 bp, Artificial Sequence
  Synthetic oligonucleotide
cggatgatctcctgccatgactcagcgcttctcgcaggctgccctgctgg

SEQ ID NO: 276 - DNA, 50 bp, Artificial Sequence
  Synthetic oligonucleotide
ctgttagccgttcacctcgtgcccgcagacttctcaaaaaatacaaatcg

SEQ ID NO: 277 - DNA, 50 bp, Artificial Sequence
  Synthetic oligonucleotide
agttagatctgcagttcaccttaattttggcagctcactgtatcataacg

SEQ ID NO: 278 - DNA, 50 bp, Artificial Sequence
  Synthetic oligonucleotide
cggacctagtgagccaggcagagcctttaggcccacgcctgggcaccaca

SEQ ID NO: 279 - DNA, 50 bp, Artificial Sequence
  Synthetic oligonucleotide
cccacttcttatgctctacaaaacaacagcagtaggggagtgactgcacg

SEQ ID NO: 280 - DNA, 50 bp, Artificial Sequence
  Synthetic oligonucleotide
cgccagctctccctgggaccaagcggttggcaagcgcctgcagccttggt

SEQ ID NO: 281 - DNA, 50 bp, Artificial Sequence
  Synthetic oligonucleotide
acagaaggcattttgggctaaggacgctcacaacccggtttcctgtcccg

SEQ ID NO: 282 - DNA, 50 bp, Artificial Sequence
  Synthetic oligonucleotide
tggcgccccctgtagtttatgccacgcagcggtcgcgggtgtgctgaacg

SEQ ID NO: 283 - DNA, 50 bp, Artificial Sequence
  Synthetic oligonucleotide
ttccgggggctgccccacagaagcaggtggggatcgacagtggctctccg

SEQ ID NO: 284 - DNA, 50 bp, Artificial Sequence
  Synthetic oligonucleotide
cgaacggtgaatctgctatggtagggacggcgcggaccttggagccatcg

SEQ ID NO: 285 - DNA, 50 bp, Artificial Sequence
  Synthetic oligonucleotide
gatgctgagctgagttgattcccaaatataaatgttcttttcagaatccg

SEQ ID NO: 286 - DNA, 50 bp, Artificial Sequence
  Synthetic oligonucleotide
cggctttccgcttggctggagacacgcaaactgaatctgcaagtaatgca

SEQ ID NO: 287 - DNA, 50 bp, Artificial Sequence
  Synthetic oligonucleotide
cggcgggttaggaactcgctggcgtcaggctgattccaaggcccccaaac

SEQ ID NO: 288 - DNA, 50 bp, Artificial Sequence
  Synthetic oligonucleotide
cgctcccctcgccctgcagctcggctgagacgcctccctgagacaccgcc

SEQ ID NO: 289 - DNA, 50 bp, Artificial Sequence
  Synthetic oligonucleotide
cgcttccctaacctgtgtccaggcaacaaaggggtccttgtttttgcaca

SEQ ID NO: 290 - DNA, 50 bp, Artificial Sequence
  Synthetic oligonucleotide
tagacccaggacggtcttgtaggctcaatgtgtgtgtttcatcccaggcg

SEQ ID NO: 291 - DNA, 50 bp, Artificial Sequence
  Synthetic oligonucleotide
cgcactctcccaacattcggggaagggcgtgccttcaggatttggagtag

SEQ ID NO: 292 - DNA, 50 bp, Artificial Sequence
  Synthetic oligonucleotide
atgaatggatgctcctcccaggtggcacccagagcctggccccatccacg

SEQ ID NO: 293 - DNA, 50 bp, Artificial Sequence
  Synthetic oligonucleotide
cggacgcactgcagagacgtccctgttttcggcgcgtcctccgacaccca

SEQ ID NO: 294 - DNA, 50 bp, Artificial Sequence
  Synthetic oligonucleotide
gcgcggggcagtcagagtccccctacttgagcgggttgtggcggagagcg

SEQ ID NO: 295 - DNA, 50 bp, Artificial Sequence
  Synthetic oligonucleotide
cggtgcatcttactgagaacatgttattatgctttattctcggtactgaa

SEQ ID NO: 296 - DNA, 50 bp, Artificial Sequence
  Synthetic oligonucleotide
ttagctgctggtgcggggcaggcctggggcagcgcggggcgaggaaggcg

SEQ ID NO: 297 - DNA, 50 bp, Artificial Sequence
  Synthetic oligonucleotide
agcgtggaaggcggcgggctcaggcgggctttccggtcattagcgcagcg

SEQ ID NO: 298 - DNA, 50 bp, Artificial Sequence
  Synthetic oligonucleotide
tgttcaaagtcttttctctgacagcatctgtctctaaaggccgaacaacg

SEQ ID NO: 299 - DNA, 50 bp, Artificial Sequence
  Synthetic oligonucleotide
cggcttggcgagggtctcctctgacccacttagccttgccagcgctcaga

SEQ ID NO: 300 - DNA, 50 bp, Artificial Sequence
  Synthetic oligonucleotide
agtaccaggcctgtagcggtggggcttcttcacgccaccggtggctggcg

SEQ ID NO: 301 - DNA, 50 bp, Artificial Sequence
  Synthetic oligonucleotide
ggtcaaaaatcccagcatccttctgtacctctcaaaagccctgtttttcg

SEQ ID NO: 302 - DNA, 50 bp, Artificial Sequence
  Synthetic oligonucleotide
ccccgcggtgggtgtgtgaaagtcagggtggcagtgacgcggcgcctgcg

SEQ ID NO: 303 - DNA, 50 bp, Artificial Sequence
  Synthetic oligonucleotide
gcaactctgatccaaatatttaactgtgagttataaatccagacatcacg

SEQ ID NO: 304 - DNA, 50 bp, Artificial Sequence
  Synthetic oligonucleotide
ggcgcgcctgggccaggccgagaacaatgcacgtattaggatatcagccg

SEQ ID NO: 305 - DNA, 50 bp, Artificial Sequence
  Synthetic oligonucleotide
ggaacatggtgcggcttcggggctgccagcgggaagccgttgggaagtcg

SEQ ID NO: 306 - DNA, 50 bp, Artificial Sequence
  Synthetic oligonucleotide
cgcgaaaatcagttccgcctctgccccaagagccaagaggggtggaaagg

SEQ ID NO: 307 - DNA, 50 bp, Artificial Sequence
  Synthetic oligonucleotide
cgaggccgctgctggggaggacgctggccagcgtgcagggggcggaggcg

SEQ ID NO: 308 - DNA, 50 bp, Artificial Sequence
  Synthetic oligonucleotide
ctcgccgtcgtcgagcgggggaattctttctgtgggtttcaaacgcaacg

SEQ ID NO: 309 - DNA, 50 bp, Artificial Sequence
  Synthetic oligonucleotide
cgccctcctgtccacctgctggcgcaacctgctcccccgtctctaggggt

SEQ ID NO: 310 - DNA, 50 bp, Artificial Sequence
  Synthetic oligonucleotide
cgggccggttgtacgctgtccacaccggttctcccacaaacagccgcatg

SEQ ID NO: 311 - DNA, 50 bp, Artificial Sequence
  Synthetic oligonucleotide
ggcgggcgcctccatcctgggcgggcggaagggctgggctgggctgggcg

SEQ ID NO: 312 - DNA, 50 bp, Artificial Sequence
  Synthetic oligonucleotide
ggttgtaggttgtgtgtgaatctggtccctggccccagagctctgcctcg

SEQ ID NO: 313 - DNA, 50 bp, Artificial Sequence
  Synthetic oligonucleotide
ctcgccgaattgcaagagaatctttagatcttgttcccactgtaatcccg

SEQ ID NO: 314 - DNA, 50 bp, Artificial Sequence
  Synthetic oligonucleotide
cgccacacaccccgaacccccaacacgttgctttcgcactgatgggagca

SEQ ID NO: 315 - DNA, 50 bp, Artificial Sequence
  Synthetic oligonucleotide
cggtccacggccaggtgaacaatggtaagacatgctggtcggtggctccc

SEQ ID NO: 316 - DNA, 50 bp, Artificial Sequence
  Synthetic oligonucleotide
cagaggcggtgtataaaacatacgctgcttcgggaactgcgagggggacg

SEQ ID NO: 317 - DNA, 50 bp, Artificial Sequence
  Synthetic oligonucleotide
cggggcacagaatctccctacaataccgtctttggatggtgggcatatct

SEQ ID NO: 318 - DNA, 50 bp, Artificial Sequence
  Synthetic oligonucleotide
cggctggggcaacccgatttccccacgcccccgcaccacgctctcccttg

SEQ ID NO: 319 - DNA, 50 bp, Artificial Sequence
  Synthetic oligonucleotide
cggttggatcttgcctttattgaacattttaacaatttggttactgtgga

SEQ ID NO: 320 - DNA, 50 bp, Artificial Sequence
  Synthetic oligonucleotide
gggaccgacgtcatggttcggtgcctcaagctgctgaaggaatttaaacg

SEQ ID NO: 321 - DNA, 50 bp, Artificial Sequence
  Synthetic oligonucleotide
aagtgcgcgtcccgtccgagtgcttgaggtcggcggaggcggggcaggcg

SEQ ID NO: 322 - DNA, 50 bp, Artificial Sequence
  Synthetic oligonucleotide
aggagcaagaggacgcgcaggagggcttcggtcgcggtcatctctgggcg

SEQ ID NO: 323 - DNA, 50 bp, Artificial Sequence
  Synthetic oligonucleotide
cgccccggggcgcgcagttggaggcacatccccaccgcactctccaccct

SEQ ID NO: 324 - DNA, 50 bp, Artificial Sequence
  Synthetic oligonucleotide
cgcctctagctgggctgtcatttgttctcaggagaacaccccgtccttct

SEQ ID NO: 325 - DNA, 50 bp, Artificial Sequence
  Synthetic oligonucleotide
ctgaagagtcagagtagcaccatcagattggtaccagttttgcctgaacg

SEQ ID NO: 326 - DNA, 50 bp, Artificial Sequence
  Synthetic oligonucleotide
aggcaggtgtcaagctggggctcttcttattggacgtgagggccgaggcg

SEQ ID NO: 327 - DNA, 50 bp, Artificial Sequence
  Synthetic oligonucleotide
cgcgcctaggttttcgcagctggtttctgtcggtgggttgttaataggct

SEQ ID NO: 328 - DNA, 50 bp, Artificial Sequence
  Synthetic oligonucleotide
agtttttctttcaggtagtctgagatggcccgcaccaagcagactgcacg

SEQ ID NO: 329 - DNA, 50 bp, Artificial Sequence
  Synthetic oligonucleotide
cgcccccagactccgacttagagcggactccgatcgcggcaaaccatggc

SEQ ID NO: 330 - DNA, 50 bp, Artificial Sequence
  Synthetic oligonucleotide
atgtaagggatattccccttttccctttggagtggtatccctaggacacg

SEQ ID NO: 331 - DNA, 50 bp, Artificial Sequence
  Synthetic oligonucleotide
gtagttgtgggtgaagcaaaccctaattccagaagtttttttccctagcg

SEQ ID NO: 332 - DNA, 50 bp, Artificial Sequence
  Synthetic oligonucleotide
gagccaatgaggcgggaaagtggctgcgagagcggctgccaactcggccg

SEQ ID NO: 333 - DNA, 50 bp, Artificial Sequence
  Synthetic oligonucleotide
cgccacacgccccgaccccagaacatgaccacccgtcagagccgggtact

SEQ ID NO: 334 - DNA, 50 bp, Artificial Sequence
  Synthetic oligonucleotide
tgtgtcaggggcccgtgtgttttggcgacacccgattgtcatttccttcg

SEQ ID NO: 335 - DNA, 50 bp, Artificial Sequence
  Synthetic oligonucleotide
ttcgtttgaaatggcctctgtcagcgcatcttgcgcgaaataaaacaccg

SEQ ID NO: 336 - DNA, 50 bp, Artificial Sequence
  Synthetic oligonucleotide
cggagaggcataaaagccatcacccagaagcaaatgtgtttgggctcctt

SEQ ID NO: 337 - DNA, 50 bp, Artificial Sequence
  Synthetic oligonucleotide
cgcgggagtggccaagctacccaacaggcttcacaccactcgttcatgca

SEQ ID NO: 338 - DNA, 50 bp, Artificial Sequence
  Synthetic oligonucleotide
cgcgctcgactcccgccccacctgtgccttggcgccctcgctcaccgccc

SEQ ID NO: 339 - DNA, 50 bp, Artificial Sequence
  Synthetic oligonucleotide
ctaagatctgctgagaatccccaaggtgctccaggattttcagtgttgcg

SEQ ID NO: 340 - DNA, 50 bp, Artificial Sequence
  Synthetic oligonucleotide
cgttaggaagatctaaactgaagcactagaaaggtctgtgactctgttct

SEQ ID NO: 341 - DNA, 50 bp, Artificial Sequence
  Synthetic oligonucleotide
cttgcgtgagcagtagcctcagctctgcgttctttggacactttccagcg

SEQ ID NO: 342 - DNA, 50 bp, Artificial Sequence
  Synthetic oligonucleotide
cggcagctgtatcttctgggatggattcttatagcacctatttggcaact

SEQ ID NO: 343 - DNA, 50 bp, Artificial Sequence
  Synthetic oligonucleotide
gaaatggtttaattcatgctcaggagctgtgtgcctttccatcccttccg

SEQ ID NO: 344 - DNA, 50 bp, Artificial Sequence
  Synthetic oligonucleotide
cgctgctcagaaagaaaacctcactgataggacctccacccagacctctt

SEQ ID NO: 345 - DNA, 50 bp, Artificial Sequence
  Synthetic oligonucleotide
tggtagtaaagacagcggctgtttattaaactctgcttatctcagcttcg

SEQ ID NO: 346 - DNA, 50 bp, Artificial Sequence
  Synthetic oligonucleotide
cgggctgacacaaataggcttcttcaagagttgaggaagaaaacaaaatc

SEQ ID NO: 347 - DNA, 50 bp, Artificial Sequence
  Synthetic oligonucleotide
tcccgcttttgctaagcgtggcgggtcccaggcagggttggggagcgacg

SEQ ID NO: 348 - DNA, 50 bp, Artificial Sequence
  Synthetic oligonucleotide
cggcgctggactccctccaggtcacaccgcctgaggtcacaccgtctggg

SEQ ID NO: 349 - DNA, 50 bp, Artificial Sequence
  Synthetic oligonucleotide
cacagagaaactgctgaggtttctctgcaaagctaaagaaatttaattcg

SEQ ID NO: 350 - DNA, 50 bp, Artificial Sequence
  Synthetic oligonucleotide
aatctggttgccatggagaccatgctgttgtcaaggtggctgattggccg

SEQ ID NO: 351 - DNA, 50 bp, Artificial Sequence
  Synthetic oligonucleotide
cgccctccgtcccacggttctgctccgcagggaggctcggccccatctct

SEQ ID NO: 352 - DNA, 50 bp, Artificial Sequence
  Synthetic oligonucleotide
tccggaaggcaaattatctttccacaccagaaaggtttataaacaagccg

SEQ ID NO: 353 - DNA, 50 bp, Artificial Sequence
  Synthetic oligonucleotide
cggagccacaggccgcaccagcccgtctttgatcccgggtgttcggactc

SEQ ID NO: 354 - DNA, 50 bp, Artificial Sequence
  Synthetic oligonucleotide
ccgcgcgcttcatttttatcaggctcctgggtgtgtgcagggagggaacg

SEQ ID NO: 355 - DNA, 50 bp, Artificial Sequence
  Synthetic oligonucleotide
cgctttcagaggaatttttttaaggctcagctgacagcactacagtcctg

SEQ ID NO: 356 - DNA, 50 bp, Artificial Sequence
  Synthetic oligonucleotide
cgccggaatcccaccagcctgcagccacggtaggcaagagcctcggggaa

SEQ ID NO: 357 - DNA, 50 bp, Artificial Sequence
  Synthetic oligonucleotide
tgtcacttacctagagatgttctcacgagagcttgcgcctaccaggatcg

SEQ ID NO: 358 - DNA, 50 bp, Artificial Sequence
  Synthetic oligonucleotide
taccggccggaggacacggggggacgctgggaactcggggtgaagggacg

SEQ ID NO: 359 - DNA, 50 bp, Artificial Sequence
  Synthetic oligonucleotide
caagtacaccagctccaagtaaactagttacctgggtaaaagcgctaacg

SEQ ID NO: 360 - DNA, 50 bp, Artificial Sequence
  Synthetic oligonucleotide
gtaatgtcctcatagattgcttgtatcttcagctgcgtctgtggcctgcg

SEQ ID NO: 361 - DNA, 50 bp, Artificial Sequence
  Synthetic oligonucleotide
cgcccgcaaaggcgccctccggcagaagaacgtgcatgaggtcaagaacc

SEQ ID NO: 362 - DNA, 50 bp, Artificial Sequence
  Synthetic oligonucleotide
gaaaagtgttttgtctgaagagcagaactgtcttataccagccctgtgcg

SEQ ID NO: 363 - DNA, 50 bp, Artificial Sequence
  Synthetic oligonucleotide
cgggcgggctgaagcccccgcgcaagttcgagacacacttacagttagtt

SEQ ID NO: 364 - DNA, 50 bp, Artificial Sequence
  Synthetic oligonucleotide
ctttctattgactaattgtcaagacattagacttccatctgggagatacg

SEQ ID NO: 365 - DNA, 50 bp, Artificial Sequence
  Synthetic oligonucleotide
tcccttcagtgcttccgaagacaccggaggggagtaccccgcgtagagcg

SEQ ID NO: 366 - DNA, 50 bp, Artificial Sequence
  Synthetic oligonucleotide
tggccttagcccggactgtgagtctcgagcggcttccgagaggcagctcg

SEQ ID NO: 367 - DNA, 50 bp, Artificial Sequence
  Synthetic oligonucleotide
cggcctcacccagcgaccccaagggtaggccctctccggagctgccggct

SEQ ID NO: 368 - DNA, 50 bp, Artificial Sequence
  Synthetic oligonucleotide
cccttctgacgactgtacgatctgatgataaatcatgtgtttgagactcg

SEQ ID NO: 369 - DNA, 50 bp, Artificial Sequence
  Synthetic oligonucleotide
cggcgacgtacactgctgcttagggagcaaagcacttccaccgctttcac

SEQ ID NO: 370 - DNA, 50 bp, Artificial Sequence
  Synthetic oligonucleotide
taatatctattaggagcttctcagcaggaccaggactttaaggactttcg

SEQ ID NO: 371 - DNA, 50 bp, Artificial Sequence
  Synthetic oligonucleotide
acaggttaataaacaacctgtccggcacaggttaacaggagcctctctcg

SEQ ID NO: 372 - DNA, 50 bp, Artificial Sequence
  Synthetic oligonucleotide
cagaggtggccacccctgttcccctcctggcaccatgatggtcaggaccg

SEQ ID NO: 373 - DNA, 50 bp, Artificial Sequence
  Synthetic oligonucleotide
ctagtgatcgcctccctgaccttggccttgtcaggaggtaagaatgcgcg

SEQ ID NO: 374 - DNA, 50 bp, Artificial Sequence
  Synthetic oligonucleotide
gctgctccctggagcttgctcaggtcaggtgaggaggatacactagcccg

SEQ ID NO: 375 - DNA, 50 bp, Artificial Sequence
  Synthetic oligonucleotide
cgcctaagcctggcagaggcaaagcgctagacggagcaccgcaaaagccc

SEQ ID NO: 376 - DNA, 50 bp, Artificial Sequence
  Synthetic oligonucleotide
cgcagaaatatctctctccgcccgagaggaagcgtctggccaagatgctg

SEQ ID NO: 377 - DNA, 50 bp, Artificial Sequence
  Synthetic oligonucleotide
cggatgcattcgtgattgcaacagattgaagaaattagaccagacaaaga

SEQ ID NO: 378 - DNA, 50 bp, Artificial Sequence
  Synthetic oligonucleotide
atattatttatatagattgtcctcccactcgtcctcagcctataggaacg

SEQ ID NO: 379 - DNA, 50 bp, Artificial Sequence
  Synthetic oligonucleotide
ccctctccagaaatcaattaatttctcccatggtattactgtaaatatcg

SEQ ID NO: 380 - DNA, 50 bp, Artificial Sequence
  Synthetic oligonucleotide
agagccgagatttgggctctgaagcccgacggcccttcaacatgtctgcg

SEQ ID NO: 381 - DNA, 50 bp, Artificial Sequence
  Synthetic oligonucleotide
cgcgcatccgagaccgcctccccaaagcccgcttcatcgccaagagcggg

SEQ ID NO: 382 - DNA, 50 bp, Artificial Sequence
  Synthetic oligonucleotide
gacccctccccgcaaaaggcaaaatcaagactacagaaggtgaactttcg

SEQ ID NO: 383 - DNA, 50 bp, Artificial Sequence
  Synthetic oligonucleotide
cggtgagctggctgcggaggaaccaaagaaaaatgaatcctcgaggaacc

SEQ ID NO: 384 - DNA, 50 bp, Artificial Sequence
  Synthetic oligonucleotide
cctctgcggcagagaactgcttcccggtgagctcgtggtgggtggaggcg

SEQ ID NO: 385 - DNA, 50 bp, Artificial Sequence
  Synthetic oligonucleotide
accatgccgttgtaccgtctgggtacagagcaaagggtctcgtttttacg

SEQ ID NO: 386 - DNA, 50 bp, Artificial Sequence
  Synthetic oligonucleotide
ggcctgcaggcgcgacctgaggccgccagggaggctgggtggcgagggcg

SEQ ID NO: 387 - DNA, 50 bp, Artificial Sequence
  Synthetic oligonucleotide
ctgggtggtgggcggcttagacctaattccggagttaatggcggcggccg

SEQ ID NO: 388 - DNA, 50 bp, Artificial Sequence
  Synthetic oligonucleotide
cacggggctgcccttttccacccctaggggcctgctgaagactgaggacg

SEQ ID NO: 389 - DNA, 50 bp, Artificial Sequence
  Synthetic oligonucleotide
ccttgggctctgggcactatgtgggaggcagcatcaggtccatggcggcg

SEQ ID NO: 390 - DNA, 50 bp, Artificial Sequence
  Synthetic oligonucleotide
cgcgagttcggagcagcgcgtgtatctgtgggtctttggggctggcctcg

SEQ ID NO: 391 - DNA, 50 bp, Artificial Sequence
  Synthetic oligonucleotide
cggcaggcctgattggtgggcttttaaacgtgactaatgaagaaaattta

SEQ ID NO: 392 - DNA, 50 bp, Artificial Sequence
  Synthetic oligonucleotide
aattaaacccataaccaaggaatatactaggttcaactatgtacttaacg

SEQ ID NO: 393 - DNA, 50 bp, Artificial Sequence
  Synthetic oligonucleotide
tcagcaaaataaaggattcactgcaattcatccttctgtggtcactgccg

SEQ ID NO: 394 - DNA, 50 bp, Artificial Sequence
  Synthetic oligonucleotide
tttttggactggaaggcggggaacctgatcctgcctttgactcaattacg

SEQ ID NO: 395 - DNA, 50 bp, Artificial Sequence
  Synthetic oligonucleotide
cgccatctgattgctattagggctggggaaaagggaattcctggttccat

SEQ ID NO: 396 - DNA, 50 bp, Artificial Sequence
  Synthetic oligonucleotide
cggcaaatagcgacatgctctcggtttctgtcggccttggcctggcagag

SEQ ID NO: 397 - DNA, 50 bp, Artificial Sequence
  Synthetic oligonucleotide
cggccacctcctcccgacgctttcagcagcccacgcggctcttccggccc

SEQ ID NO: 398 - DNA, 50 bp, Artificial Sequence
  Synthetic oligonucleotide
acagcagtgaggttagaacgtgaggggatcacagacttcgtccaccttcg

SEQ ID NO: 399 - DNA, 50 bp, Artificial Sequence
  Synthetic oligonucleotide
aaatgtaaaccttaggattggttcttgggtgaagagtccgctgctcttcg

SEQ ID NO: 400 - DNA, 50 bp, Artificial Sequence
  Synthetic oligonucleotide
cgcggaagcctaacccccaggtgctcctcgatgacggcttcgtgccttct

SEQ ID NO: 401 - DNA, 50 bp, Artificial Sequence
  Synthetic oligonucleotide
cggggctcgctcccgcactttgaaggctgccgcggtctttcgtcatttat

SEQ ID NO: 402 - DNA, 50 bp, Artificial Sequence
  Synthetic oligonucleotide
cgcacccatcacctaaccgtgtctctggtcacctgtgggtttcagcgggt

SEQ ID NO: 403 - DNA, 50 bp, Artificial Sequence
  Synthetic oligonucleotide
cggccacaccgctggagtcctgggctggcagcggtaaccttatccttgtg

SEQ ID NO: 404 - DNA, 50 bp, Artificial Sequence
  Synthetic oligonucleotide
gaggacctcgccgctctgaagagcaccgtgcacatgtgggtgcacaaacg

SEQ ID NO: 405 - DNA, 50 bp, Artificial Sequence
  Synthetic oligonucleotide
cggctccatggttctcatgccccaaagtcctgcaaattgacacgtaagta

SEQ ID NO: 406 - DNA, 50 bp, Artificial Sequence
  Synthetic oligonucleotide
tcagaggactgaacaacaccagaggcgtgaagcttggtgcacggcagccg

SEQ ID NO: 407 - DNA, 50 bp, Artificial Sequence
  Synthetic oligonucleotide
cggcactcatagatccgcacgtcccgagaagcctctgccatcccaacccg

SEQ ID NO: 408 - DNA, 50 bp, Artificial Sequence
  Synthetic oligonucleotide
atggctggacttgctgcgtgggtgatcccaggactaaggcaattagaacg

SEQ ID NO: 409 - DNA, 50 bp, Artificial Sequence
  Synthetic oligonucleotide
ggctcctccagggttccggctggtgggaatctagggaggtccaggagacg

SEQ ID NO: 410 - DNA, 50 bp, Artificial Sequence
  Synthetic oligonucleotide
cggctagagactcactgactcatgcgtgtgtggtaggaatcttccaggaa

SEQ ID NO: 411 - DNA, 50 bp, Artificial Sequence
  Synthetic oligonucleotide
cgtttcgaagcaaagacaacgcatggtggcgctgcaggctaaggcttcaa

SEQ ID NO: 412 - DNA, 50 bp, Artificial Sequence
  Synthetic oligonucleotide
tcagaaactcctggttcaccgcgtcggccagtgagaagtccagcagctcg

SEQ ID NO: 413 - DNA, 50 bp, Artificial Sequence
  Synthetic oligonucleotide
taatacaataacagaggcctccgctccatttgcattaggtgaggagcgcg

SEQ ID NO: 414 - DNA, 50 bp, Artificial Sequence
  Synthetic oligonucleotide
cgccggggccccgcccaggccctaacgaatacatcccattggcaggaacc

SEQ ID NO: 415 - DNA, 50 bp, Artificial Sequence
  Synthetic oligonucleotide
cgcccagcctcgctgttcttatcttggcagcagattccgaatgtcggctg

SEQ ID NO: 416 - DNA, 50 bp, Artificial Sequence
  Synthetic oligonucleotide
cgcccagtgaggtccagagaagagagggaccttccgagggtcttctagtc

SEQ ID NO: 417 - DNA, 50 bp, Artificial Sequence
  Synthetic oligonucleotide
tctccttagagggactgagtcgggatgccagaaaccctgagattctctcg

SEQ ID NO: 418 - DNA, 50 bp, Artificial Sequence
  Synthetic oligonucleotide
ctgcggctgaggcaggctccgcagaccccgagccagagtgggatttaacg

SEQ ID NO: 419 - DNA, 50 bp, Artificial Sequence
  Synthetic oligonucleotide
gatgtgctgccgggctcaggtcccgcaggagacccacctggagttcctcg

SEQ ID NO: 420 - DNA, 50 bp, Artificial Sequence
  Synthetic oligonucleotide
cggcccctgaacttttgcctgcaccggggccgccccgcaccccccgccaa

SEQ ID NO: 421 - DNA, 50 bp, Artificial Sequence
  Synthetic oligonucleotide
cgtagagctggagggcgatggtggcggagctgctgggggcggaggcaacg

SEQ ID NO: 422 - DNA, 50 bp, Artificial Sequence
  Synthetic oligonucleotide
cgcatttggggactcacctttggagaacttttgaaatgtggcagtttagt

SEQ ID NO: 423 - DNA, 50 bp, Artificial Sequence
  Synthetic oligonucleotide
cgccccctcaccagcgcctagccagtccgtgtccctccgcctccaggagg

SEQ ID NO: 424 - DNA, 50 bp, Artificial Sequence
  Synthetic oligonucleotide
cgaccccgccctgccgcccactgccctttcctgcgagaccctggctccgc

SEQ ID NO: 425 - DNA, 50 bp, Artificial Sequence
  Synthetic oligonucleotide
cgcgcccttcgcgcctggaccagccttatccggggcaccctggacctcac

SEQ ID NO: 426 - DNA, 50 bp, Artificial Sequence
  Synthetic oligonucleotide
acgttatgcttacaaatgtttgctgctagagatctggcacgacagtgacg

SEQ ID NO: 427 - DNA, 50 bp, Artificial Sequence
  Synthetic oligonucleotide
cggcgagcgctgctcagcttcaagcctggaggagcctcccactcaccaac

SEQ ID NO: 428 - DNA, 50 bp, Artificial Sequence
  Synthetic oligonucleotide
cgtttgggctcaccagcattttcctgtggtcatttgacggtatcacttcg

SEQ ID NO: 429 - DNA, 50 bp, Artificial Sequence
  Synthetic oligonucleotide
cggctgccctaaaatgagagtttgtctttgagttggatcatgactctgtt

SEQ ID NO: 430 - DNA, 50 bp, Artificial Sequence
  Synthetic oligonucleotide
cttggaaatgacaaacactcctcgtggtcgtctgatcccagatcattgcg

SEQ ID NO: 431 - DNA, 50 bp, Artificial Sequence
  Synthetic oligonucleotide
gaggagttctgagacccccagtaattcccttgcagaccctgcggagcgcg

SEQ ID NO: 432 - DNA, 50 bp, Artificial Sequence
  Synthetic oligonucleotide
agtaggctgggaggctgcaagagcgagtgcggagctgggtgacagcaacg

SEQ ID NO: 433 - DNA, 50 bp, Artificial Sequence
  Synthetic oligonucleotide
agcccgctgtgtgcagggtgcagcagtgacaagcaacagtgctggtgtcg

SEQ ID NO: 434 - DNA, 50 bp, Artificial Sequence
  Synthetic oligonucleotide
aatgggatctagtgcttcttacctgatggacaggttctataccattatcg

SEQ ID NO: 435 - DNA, 50 bp, Artificial Sequence
  Synthetic oligonucleotide
cggaactttgtgaacagctggggactatgcttaaagacaaagtctgactg

SEQ ID NO: 436 - DNA, 50 bp, Artificial Sequence
  Synthetic oligonucleotide
cggaggagctgactaccagaagcccccagtgggtgttaaatcacaagcta

SEQ ID NO: 437 - DNA, 50 bp, Artificial Sequence
  Synthetic oligonucleotide
cggtcccattatcccgagcacgaccggctgcgttcacaccgcaaagtcac

SEQ ID NO: 438 - DNA, 50 bp, Artificial Sequence
  Synthetic oligonucleotide
cgggtgcttttaaatacacctgggtattatgagcatgtaatctggcctaa

SEQ ID NO: 439 - DNA, 50 bp, Artificial Sequence
  Synthetic oligonucleotide
cagaatctctggcttcagctctgcaagacccgtgtgtggacactcttccg

SEQ ID NO: 440 - DNA, 50 bp, Artificial Sequence
  Synthetic oligonucleotide
cgcgttccttgttgagtcatttcctgtcttgattttaggaccttcctccg

SEQ ID NO: 441 - DNA, 50 bp, Artificial Sequence
  Synthetic oligonucleotide
ctttgggttcgaagagacagaccccacggaagatgcctccagggttggcg

SEQ ID NO: 442 - DNA, 50 bp, Artificial Sequence
  Synthetic oligonucleotide
cgcgcctgtgagcactcaccttcccgccgtgacccgggcccagggcttca

SEQ ID NO: 443 - DNA, 50 bp, Artificial Sequence
  Synthetic oligonucleotide
gtacatggcacttgaggttcactttgtccaaaccagtacctcttatctcg

SEQ ID NO: 444 - DNA, 50 bp, Artificial Sequence
  Synthetic oligonucleotide
cgctgtgaccgccacaaagtgaatcctttcggtgcggacagtcgccttca

SEQ ID NO: 445 - DNA, 50 bp, Artificial Sequence
  Synthetic oligonucleotide
cgcagcagcccagggacgcgatgacactttattcccgcgttccacaccgc

SEQ ID NO: 446 - DNA, 50 bp, Artificial Sequence
  Synthetic oligonucleotide
acctggcagggctggggtggggattgcagctagtccatgacccaactacg

SEQ ID NO: 447 - DNA, 50 bp, Artificial Sequence
  Synthetic oligonucleotide
cactcacacacagtaagctgggtccggggggtcagtttacccatagatcg

SEQ ID NO: 448 - DNA, 50 bp, Artificial Sequence
  Synthetic oligonucleotide
cggcgccagtgtgtcccgggcgaggtaggggcaggcaaaaggcggctgcg

SEQ ID NO: 449 - DNA, 50 bp, Artificial Sequence
  Synthetic oligonucleotide
tgtagtcacctgattaacaagagccagagttcattgcatgctgatcaacg

SEQ ID NO: 450 - DNA, 50 bp, Artificial Sequence
  Synthetic oligonucleotide
cgcaataatgctgcgtcacgaaactgcgcattccaagagaaacttttctc

SEQ ID NO: 451 - DNA, 50 bp, Artificial Sequence
  Synthetic oligonucleotide
cgctgaggcagcggcagactagagctcctggtccgagttcgtctgcagac

SEQ ID NO: 452 - DNA, 50 bp, Artificial Sequence
  Synthetic oligonucleotide
gccccgggcagaataggtgactacagatattctcctgatgcgacaggtcg

SEQ ID NO: 453 - DNA, 50 bp, Artificial Sequence
  Synthetic oligonucleotide
tcagagcctctgattctgcagaacgcagacttgcagctggtccacggccg

SEQ ID NO: 454 - DNA, 50 bp, Artificial Sequence
  Synthetic oligonucleotide
ggactggggactgcccccaacttccgagcggcagaatctggcgcttggcg

SEQ ID NO: 455 - DNA, 50 bp, Artificial Sequence
  Synthetic oligonucleotide
caacctcgctgagttggtgcagctccaggtcattcctggggtgggaatcg

SEQ ID NO: 456 - DNA, 50 bp, Artificial Sequence
  Synthetic oligonucleotide
tttcacacattttgtcgccactgcccagactttgactaaccttgtgagcg

SEQ ID NO: 457 - DNA, 50 bp, Artificial Sequence
  Synthetic oligonucleotide
cgcccagcccccagctctttgttctggcgcagcctttagcctcagagcgc

SEQ ID NO: 458 - DNA, 50 bp, Artificial Sequence
  Synthetic oligonucleotide
cggatacgcacccacagtggctgattcgggggtaaccgtgtcatttgctt

SEQ ID NO: 459 - DNA, 50 bp, Artificial Sequence
  Synthetic oligonucleotide
gcagccgaagtaggcgtttggggaggcgaactcatcggggcaaagaagcg

SEQ ID NO: 460 - DNA, 50 bp, Artificial Sequence
  Synthetic oligonucleotide
cggaacatgtttgcttatttatccatagttctcctaggaaggacggtgtt

SEQ ID NO: 461 - DNA, 50 bp, Artificial Sequence
  Synthetic oligonucleotide
cgtggccgctctcaactcctccaattgcgggttccaggccatccgcggaa

SEQ ID NO: 462 - DNA, 50 bp, Artificial Sequence
  Synthetic oligonucleotide
cgccccctagccattcttagctgggggaggccagcacggatcagccgctt

SEQ ID NO: 463 - DNA, 50 bp, Artificial Sequence
  Synthetic oligonucleotide
cgcctccaccctgccccacccaggccgcgcgcaccccggaaacctggact

SEQ ID NO: 464 - DNA, 50 bp, Artificial Sequence
  Synthetic oligonucleotide
cgcctgcaagaccgcatttgttctcttaacacagggcagtgaacggccgc

SEQ ID NO: 465 - DNA, 50 bp, Artificial Sequence
  Synthetic oligonucleotide
cggaaagtcaaaatcgcaagcacttgcagtcgctagcgaagtcggtttct

SEQ ID NO: 466 - DNA, 50 bp, Artificial Sequence
  Synthetic oligonucleotide
acaggtagaagaccaaaaggccaatgagacttctttcctatttgagatcg

SEQ ID NO: 467 - DNA, 50 bp, Artificial Sequence
  Synthetic oligonucleotide
tctgctcagggtcgtcgctcatgctgcgggcgggagggcgggctgagccg

SEQ ID NO: 468 - DNA, 50 bp, Artificial Sequence
  Synthetic oligonucleotide
tacgtcaacgcgggctcattctgagaaaaactttctttagcttgtacgcg

SEQ ID NO: 469 - DNA, 50 bp, Artificial Sequence
  Synthetic oligonucleotide
atgagacggagggcaccatgggagctggctctcttgctattcataaagcg

SEQ ID NO: 470 - DNA, 50 bp, Artificial Sequence
  Synthetic oligonucleotide
ctttcaggttccagggcactcgccactttttccaaagccatcagtctgcg

SEQ ID NO: 471 - DNA, 50 bp, Artificial Sequence
  Synthetic oligonucleotide
ctctttagtcggagaagtccaagtcgggcgagggggcaccccggggttcg

SEQ ID NO: 472 - DNA, 50 bp, Artificial Sequence
  Synthetic oligonucleotide
tgcgttgggaaggcatggggtgcggaacccggcctgacctcgctgtcccg

SEQ ID NO: 473 - DNA, 50 bp, Artificial Sequence
  Synthetic oligonucleotide
ttcagaggtccctagcactcactcgtgtgcttgtgatttgctagacttcg

SEQ ID NO: 474 - DNA, 50 bp, Artificial Sequence
  Synthetic oligonucleotide
ccctcgctggggcacctggggagggggcgctggggcacctggagagggcg

SEQ ID NO: 475 - DNA, 50 bp, Artificial Sequence
  Synthetic oligonucleotide
cgcagtgatcccgtgacccctgttgctagacatccagaggcttctggtcc

SEQ ID NO: 476 - DNA, 50 bp, Artificial Sequence
  Synthetic oligonucleotide
tgctgagcccccgccgtgtacgggggccattgtggggccttggggtctcg

SEQ ID NO: 477 - DNA, 50 bp, Artificial Sequence
  Synthetic oligonucleotide
cggagaaaacacttcaccctggaaccctaactcaggtcctggcaaaagat

SEQ ID NO: 478 - DNA, 50 bp, Artificial Sequence
  Synthetic oligonucleotide
tatttaaagctcagaatatgataaaggtcctgtctccaccacttcaaacg

SEQ ID NO: 479 - DNA, 50 bp, Artificial Sequence
  Synthetic oligonucleotide
gtgggcggggacagggcccctgctggaagaggcgcagcagcgaggtggcg

SEQ ID NO: 480 - DNA, 50 bp, Artificial Sequence
  Synthetic oligonucleotide
cgccgtaggatcttgcgttcggcgctctcccagtggaggccaacaccaaa

SEQ ID NO: 481 - DNA, 50 bp, Artificial Sequence
  Synthetic oligonucleotide
aggggtcgggggctcacacgccctgcgatttcctcccatgagaatgggcg

SEQ ID NO: 482 - DNA, 50 bp, Artificial Sequence
  Synthetic oligonucleotide
cgatccttgggctataagccatctgacttcaactatcactgctgtgtttg

SEQ ID NO: 483 - DNA, 50 bp, Artificial Sequence
  Synthetic oligonucleotide
cgccgccccgcaggagcacgcactcccacacaaagcgcctgcagctgaca

SEQ ID NO: 484 - DNA, 50 bp, Artificial Sequence
  Synthetic oligonucleotide
acaaggggtcacacgtgcgtgtgcctggccttcgcaggtggatgtgtgcg

SEQ ID NO: 485 - DNA, 50 bp, Artificial Sequence
  Synthetic oligonucleotide
cgcccactaattcctttggtgctgctcctggtccaggtcagcaacagccc

SEQ ID NO: 486 - DNA, 50 bp, Artificial Sequence
  Synthetic oligonucleotide
cgtggtttaacagtcaaatattagtgttagttgctcatgcaccatgattg

SEQ ID NO: 487 - DNA, 50 bp, Artificial Sequence
  Synthetic oligonucleotide
cggatttcaagaagtctttgacggtgcaaactggacttctaatcatggga

SEQ ID NO: 488 - DNA, 50 bp, Artificial Sequence
  Synthetic oligonucleotide
acgcagtgcgtgtcaggtaggagtaaatgcttatagagtttcatctcgcg

SEQ ID NO: 489 - DNA, 50 bp, Artificial Sequence
  Synthetic oligonucleotide
gcagcgtcagtcgtctgcaggaatttgtgctggggtaaatgcgcgcttcg

SEQ ID NO: 490 - DNA, 50 bp, Artificial Sequence
  Synthetic oligonucleotide
acttaggaaacaggcccagggaagtagcagaacagtagcgctagaggacg

SEQ ID NO: 491 - DNA, 50 bp, Artificial Sequence
  Synthetic oligonucleotide
cggccccgccggcctcgcacccggtaattgcagcttccccccggggccct

SEQ ID NO: 492 - DNA, 50 bp, Artificial Sequence
  Synthetic oligonucleotide
cgcgggctgctacagaatcccagccgggcttctaccatccaaaccccttt

SEQ ID NO: 493 - DNA, 50 bp, Artificial Sequence
  Synthetic oligonucleotide
tcaagaacatctgactccaccataattctcctgtattgcacaggatgtcg

SEQ ID NO: 494 - DNA, 50 bp, Artificial Sequence
  Synthetic oligonucleotide
cgcgcccccagcttcgcggcagctaggtccctccccagcgcgctgagctc

SEQ ID NO: 495 - DNA, 50 bp, Artificial Sequence
  Synthetic oligonucleotide
atcctggtgtcgactgtgagttcccagcagaggcccagagtcccggtccg

SEQ ID NO: 496 - DNA, 50 bp, Artificial Sequence
  Synthetic oligonucleotide
cgcctggccccgatcagtccccaccaggaccacctatttccccaagtcgg

SEQ ID NO: 497 - DNA, 50 bp, Artificial Sequence
  Synthetic oligonucleotide
ctcctcgccgtctacagtcggcatagtttgaagtctgtttacttgtcccg

SEQ ID NO: 498 - DNA, 50 bp, Artificial Sequence
  Synthetic oligonucleotide
cgatgtcagacatttcatgtcctgtccatgtggaagactgcatccttgac

SEQ ID NO: 499 - DNA, 50 bp, Artificial Sequence
  Synthetic oligonucleotide
tgaagtggagcagactcaccggcaaggagcccggaaaatcgtcaggggcg

SEQ ID NO: 500 - DNA, 50 bp, Artificial Sequence
  Synthetic oligonucleotide
ggtggctcaggtgacacgggcatccttcaaggaagggcggcgggacggcg

SEQ ID NO: 501 - DNA, 50 bp, Artificial Sequence
  Synthetic oligonucleotide
aatcctccttgcagtaaatgctaccgtccttggcaaagcaggtgagctcg

SEQ ID NO: 502 - DNA, 50 bp, Artificial Sequence
  Synthetic oligonucleotide
ataagaccatcaaaagcaatgtcccaggacttacaatgtttgctaagacg

SEQ ID NO: 503 - DNA, 50 bp, Artificial Sequence
  Synthetic oligonucleotide
cgtcgccagtgtgggagatcatttataatcttgatggatacaggtatagc

SEQ ID NO: 504 - DNA, 50 bp, Artificial Sequence
  Synthetic oligonucleotide
tgtgggctgtgccagaaccctgggaagagcaacgtggtcggagggtcccg

SEQ ID NO: 505 - DNA, 50 bp, Artificial Sequence
  Synthetic oligonucleotide
cggtttcgatttgggacaccacctgtcagccaggcaggttaaactgacgg

SEQ ID NO: 506 - DNA, 50 bp, Artificial Sequence
  Synthetic oligonucleotide
cgcaccagcgagtcccagggcctccctcacactcccgagaggaatctatt

SEQ ID NO: 507 - DNA, 50 bp, Artificial Sequence
  Synthetic oligonucleotide
cggcgccccctcattagagggcgtttgttagggaatgttttcccagcgat

SEQ ID NO: 508 - DNA, 50 bp, Artificial Sequence
  Synthetic oligonucleotide
cgacccagtcctgacccggcccgctgcgcgccgacctcctagctgccccg

SEQ ID NO: 509 - DNA, 50 bp, Artificial Sequence
  Synthetic oligonucleotide
ggggcagtcttgggatggccatcgtccacatccctgaatggggcaagccg

SEQ ID NO: 510 - DNA, 50 bp, Artificial Sequence
  Synthetic oligonucleotide
cgggggcctaaaaagactgcttacatacaccaccttggatctttcagatt

SEQ ID NO: 511 - DNA, 50 bp, Artificial Sequence
  Synthetic oligonucleotide
cgtcaggaatttgactctgtgagttggtttccaagagtctaagttaagca

SEQ ID NO: 512 - DNA, 50 bp, Artificial Sequence
  Synthetic oligonucleotide
cagggggcgtcggggcggagcagcgggcccagtacatccctgagtgggcg

SEQ ID NO: 513 - DNA, 50 bp, Artificial Sequence
  Synthetic oligonucleotide
cgagtgtggcctttcaaaaagaagtgcattctaattttaagttgaagttc

SEQ ID NO: 514 - DNA, 50 bp, Artificial Sequence
  Synthetic oligonucleotide
tgtattcttggggttcgggctgtattcctggaccccggctcccgggtccg

SEQ ID NO: 515 - DNA, 50 bp, Artificial Sequence
  Synthetic oligonucleotide
cgacaaatacgagaacgggtacattcacccggtcaacctggtgagtgctc

SEQ ID NO: 516 - DNA, 50 bp, Artificial Sequence
  Synthetic oligonucleotide
cgctgatgtgctttaatagcgtggtagtgaagtccaccatcaaagcaaat

SEQ ID NO: 517 - DNA, 50 bp, Artificial Sequence
  Synthetic oligonucleotide
gcctttgatcctgtgttgggacaacttgggttttcctgggtgcccacccg

SEQ ID NO: 518 - DNA, 50 bp, Artificial Sequence
  Synthetic oligonucleotide
ccctgaattacgtacacagctagcaattaaaaattaacctgtggtccccg

SEQ ID NO: 519 - DNA, 50 bp, Artificial Sequence
  Synthetic oligonucleotide
cgtccgggtgcaggacggcgctcttaccgccccaccccaaaccgttgcct

SEQ ID NO: 520 - DNA, 50 bp, Artificial Sequence
  Synthetic oligonucleotide
tgttccggagacggtgcaaacggacggggaaagtgtcggggtctggctcg

SEQ ID NO: 521 - DNA, 50 bp, Artificial Sequence
  Synthetic oligonucleotide
cgggaggcagcagagccatggcggccacccgcctctcacagggacccaga

SEQ ID NO: 522 - DNA, 50 bp, Artificial Sequence
  Synthetic oligonucleotide
cggagtgatcttctgcatcaatctaacatcttgattttgtgcgatcacaa

SEQ ID NO: 523 - DNA, 50 bp, Artificial Sequence
  Synthetic oligonucleotide
cgcccggcccagaacttcatttttaagataataaactgaggggctgagac

SEQ ID NO: 524 - DNA, 50 bp, Artificial Sequence
  Synthetic oligonucleotide
tccgagacctcagggcgcgtggcaactgggcagaagccgtctctgcagcg

SEQ ID NO: 525 - DNA, 50 bp, Artificial Sequence
  Synthetic oligonucleotide
cgctttaaagtggctacagctctgatgcaccctacttccagtgggaaact

SEQ ID NO: 526 - DNA, 50 bp, Artificial Sequence
  Synthetic oligonucleotide
ctttcctaggtgcaattggacactaagggtctgggtctttctgtctcccg

SEQ ID NO: 527 - DNA, 50 bp, Artificial Sequence
  Synthetic oligonucleotide
cgccccacgtctgcgcccaggcgaggggatttcctgccaggcgaagtaca

SEQ ID NO: 528 - DNA, 50 bp, Artificial Sequence
  Synthetic oligonucleotide
acagcttttaggtagacgtggaggcgactcagatcgcctcgcggttcccg

SEQ ID NO: 529 - DNA, 50 bp, Artificial Sequence
  Synthetic oligonucleotide
gaggagttccagtcaccgagcgaggggcgcaagggtgggtgcatcctgcg

SEQ ID NO: 530 - DNA, 50 bp, Artificial Sequence
  Synthetic oligonucleotide
gtaataaacaccagattccatgcgtgagttttctgtgtttatttgcctcg

SEQ ID NO: 531 - DNA, 50 bp, Artificial Sequence
  Synthetic oligonucleotide
cggcctttagagacagatgctgtcagagaaaagactttgaacattgacca

SEQ ID NO: 532 - DNA, 50 bp, Artificial Sequence
  Synthetic oligonucleotide
cggcgcagactctcccagctggcaccaaagccttccgcttcgccgagatc

SEQ ID NO: 533 - DNA, 50 bp, Artificial Sequence
  Synthetic oligonucleotide
cggccacctagacgcgctcagcggcgcccgccccacccggatccccgaaa

SEQ ID NO: 534 - DNA, 50 bp, Artificial Sequence
  Synthetic oligonucleotide
cgctccctcccaggggacggctagagactcactgactcatgcgtgtgtgg

SEQ ID NO: 535 - DNA, 50 bp, Artificial Sequence
  Synthetic oligonucleotide
cgcgctgactccctccgacctgggctccgatggagcagaaatagcgggac

SEQ ID NO: 536 - DNA, 50 bp, Artificial Sequence
  Synthetic oligonucleotide
cgctccccaagtctctctcgtgcgcagagcccaggctgcgcttccctggt

SEQ ID NO: 537 - DNA, 50 bp, Artificial Sequence
  Synthetic oligonucleotide
ggagcccctggcagccgcggggagggacgtggcggcctgcgtgagtgacg

SEQ ID NO: 538 - DNA, 50 bp, Artificial Sequence
  Synthetic oligonucleotide
ggagccgtggaggcggtgccttggctggggcagtcttgggatggccatcg

SEQ ID NO: 539 - DNA, 50 bp, Artificial Sequence
  Synthetic oligonucleotide
gaaaatcgaattgagtgcgggctcattcggcagcggccggcagagaagcg

SEQ ID NO: 540 - DNA, 50 bp, Artificial Sequence
  Synthetic oligonucleotide
tctctctgcccttgcgctactttttttctccaaggaaggttgtgcctgcg

SEQ ID NO: 541 - DNA, 50 bp, Artificial Sequence
  Synthetic oligonucleotide
cgatcacgtgaataggagtgtggccgctaaatccgaatggcttcagcatc

SEQ ID NO: 542 - DNA, 50 bp, Artificial Sequence
  Synthetic oligonucleotide
acccagggcagggtggtcttgagtctggagaaggccttgctcagcactcg

SEQ ID NO: 543 - DNA, 50 bp, Artificial Sequence
  Synthetic oligonucleotide
tggagagtgctgctggccgccagttgttccggagacggtgcaaacggacg

SEQ ID NO: 544 - DNA, 50 bp, Artificial Sequence
  Synthetic oligonucleotide
gttgcaggagatgagctcagcgcaaagggaaccccgcagcggcgagtgcg

SEQ ID NO: 545 - DNA, 50 bp, Artificial Sequence
  Synthetic oligonucleotide
cgccccctctggcagcacggaaacctccacgccattggctgccgaaagca

SEQ ID NO: 546 - DNA, 50 bp, Artificial Sequence
  Synthetic oligonucleotide
cgcctagaatcaaggcctctggctcgattgcgttcggcaagcgtctgcaa

SEQ ID NO: 547 - DNA, 50 bp, Artificial Sequence
  Synthetic oligonucleotide
cgggcgctttcatgtcactgcgggtttagagctgattcaaactcattgcg

SEQ ID NO: 548 - DNA, 50 bp, Artificial Sequence
  Synthetic oligonucleotide
cgcggttactgcaaggattctggcgaatgaggtctaaatagaatgagaag

SEQ ID NO: 549 - DNA, 50 bp, Artificial Sequence
  Synthetic oligonucleotide
cgcaggctccagcgcccgccaggcagattctgccggcccggctcgcactt

SEQ ID NO: 550 - DNA, 50 bp, Artificial Sequence
  Synthetic oligonucleotide
caggaagccaagttggtaatccctttcttctggtcgccttgctcaccgcg

SEQ ID NO: 551 - DNA, 50 bp, Artificial Sequence
  Synthetic oligonucleotide
aactcaacatggcctaaatgcatatcagaaactcaacatggccgggcacg

SEQ ID NO: 552 - DNA, 50 bp, Artificial Sequence
  Synthetic oligonucleotide
cgccccagctaccctggctgcagccacgccgcgcccgaggtttccccctc

SEQ ID NO: 553 - DNA, 50 bp, Artificial Sequence
  Synthetic oligonucleotide
cgggccgctctggtcacgcccctgacccgcccctcaagacctggccttag

SEQ ID NO: 554 - DNA, 50 bp, Artificial Sequence
  Synthetic oligonucleotide
gtagagcgggaaagcccgaggatcctttcagcagcacagagcagagaccg

SEQ ID NO: 555 - DNA, 50 bp, Artificial Sequence
  Synthetic oligonucleotide
cggcgaatccccgctttaggaattgcaccttggccctttgtcgtcagtcg

SEQ ID NO: 556 - DNA, 50 bp, Artificial Sequence
  Synthetic oligonucleotide
cgcgggcagcgagcttcaggtcttctgatacattgaaggaaagaaagaaa

SEQ ID NO: 557 - DNA, 50 bp, Artificial Sequence
  Synthetic oligonucleotide
cgccgcgggcacttctcctgggctctccccgaactctcccgcgacctctg

SEQ ID NO: 558 - DNA, 50 bp, Artificial Sequence
  Synthetic oligonucleotide
aaggcggcgcgcgccaaaaagatcttcggctggggggacttctactttcg

SEQ ID NO: 559 - DNA, 50 bp, Artificial Sequence
  Synthetic oligonucleotide
gtgatatcaagtgtcagggaccaccggaggcactcaataaatagaagacg

SEQ ID NO: 560 - DNA, 50 bp, Artificial Sequence
  Synthetic oligonucleotide
gaaagaataaggctcaaatgcaggcctctgcagcctccctgtcattcgcg

SEQ ID NO: 561 - DNA, 50 bp, Artificial Sequence
  Synthetic oligonucleotide
agtggtcgcagtgccgggtggagtgagagctccgctgtctgctgagggcg

SEQ ID NO: 562 - DNA, 50 bp, Artificial Sequence
  Synthetic oligonucleotide
gaggaatggagcttcgcagaggttgcatttagattcaacagttcacagcg

SEQ ID NO: 563 - DNA, 50 bp, Artificial Sequence
  Synthetic oligonucleotide
gaatggcagccctggcagggtctgcggccggctgcggaggtggggacgcg

SEQ ID NO: 564 - DNA, 50 bp, Artificial Sequence
  Synthetic oligonucleotide
cggagggaagggtaaaaaatcttgctgcaatccttagataaataaaccag

SEQ ID NO: 565 - DNA, 50 bp, Artificial Sequence
  Synthetic oligonucleotide
cgagccctcctggcatctgcacaggcggccccgcccatccccgctaggag

SEQ ID NO: 566 - DNA, 50 bp, Artificial Sequence
  Synthetic oligonucleotide
cggcctgttgaaagtgctggagcgtctttgagcagtttgttgtgatacgc

SEQ ID NO: 567 - DNA, 50 bp, Artificial Sequence
  Synthetic oligonucleotide
cgccaaaaaagaataagtgcctcccaaacaactgaatataggagctgtgt

SEQ ID NO: 568 - DNA, 50 bp, Artificial Sequence
  Synthetic oligonucleotide
gcctccgcgcggctgcagattgaaggggcaacccgatgggggaggtcccg

SEQ ID NO: 569 - DNA, 50 bp, Artificial Sequence
  Synthetic oligonucleotide
gcggcggggaggccgccttgccggggtgcatgaggctgcggagtactccg

SEQ ID NO: 570 - DNA, 50 bp, Artificial Sequence
  Synthetic oligonucleotide
cggcgactagtcggtgcatgctttctagtacctccgcacgtggtccccag

SEQ ID NO: 571 - DNA, 50 bp, Artificial Sequence
  Synthetic oligonucleotide
actttaacctgcagccgaaatggagtctataggccccttaaaaaagcgcg

SEQ ID NO: 572 - DNA, 50 bp, Artificial Sequence
  Synthetic oligonucleotide
cggtcccgatgaccaggcctctttagggtcctggctcaggctgcctttgt

SEQ ID NO: 573 - DNA, 50 bp, Artificial Sequence
  Synthetic oligonucleotide
gaaccccaggatagaagttttgtagcctattcaggttggaatatatgccg

SEQ ID NO: 574 - DNA, 50 bp, Artificial Sequence
  Synthetic oligonucleotide
cggcttccatctgagccctatagtctccaaacaaggagtgcatcagctgc

SEQ ID NO: 575 - DNA, 50 bp, Artificial Sequence
  Synthetic oligonucleotide
cgcagtcactgtggtacagtccacattccggctcagcgcctggcgagtcc

SEQ ID NO: 576 - DNA, 50 bp, Artificial Sequence
  Synthetic oligonucleotide
gcctgactggcttcggttacttcgcacaaaaagcccttgccgagcaaacg

SEQ ID NO: 577 - DNA, 50 bp, Artificial Sequence
  Synthetic oligonucleotide
cgcgtcttgacataaatcaaggactaagagagactgaagaagagcgttag

SEQ ID NO: 578 - DNA, 50 bp, Artificial Sequence
  Synthetic oligonucleotide
cgcctttccgcaacctactggctccgtagatacagccattcagccggtta

SEQ ID NO: 579 - DNA, 50 bp, Artificial Sequence
  Synthetic oligonucleotide
tccaaattcctagactctatgttacactgccttttaataatagttcaacg

SEQ ID NO: 580 - DNA, 50 bp, Artificial Sequence
  Synthetic oligonucleotide
cgcttcaggaagagaatccagtcccaaggcaaggcacgcacatccccagt

SEQ ID NO: 581 - DNA, 50 bp, Artificial Sequence
  Synthetic oligonucleotide
cgtcatttaaacgttccttatttgcgaaattccaaacagataggcgttcg

SEQ ID NO: 582 - DNA, 50 bp, Artificial Sequence
  Synthetic oligonucleotide
cgctgtctgggtcaacatttcagggaggagtctgccaccagtgtaatgta

SEQ ID NO: 583 - DNA, 50 bp, Artificial Sequence
  Synthetic oligonucleotide
cgagactgagagtgtcacagggattggacttgacctcagacatcttgacg

SEQ ID NO: 584 - DNA, 50 bp, Artificial Sequence
  Synthetic oligonucleotide
ccgcgaatggggctcgtggagcctgcaaaggagtctgcctttggtatgcg

SEQ ID NO: 585 - DNA, 50 bp, Artificial Sequence
  Synthetic oligonucleotide
cgctgccctgccccgatctcacagagttatgaccgcctcgttgcagtccg

SEQ ID NO: 586 - DNA, 50 bp, Artificial Sequence
  Synthetic oligonucleotide
acaaatggaatattaacatgctcttaaagatatcaacagttggtctctcg

SEQ ID NO: 587 - DNA, 50 bp, Artificial Sequence
  Synthetic oligonucleotide
cgcgctcccaggtgagttcagtgtggctgtgcagtcactttcttaagaca

SEQ ID NO: 588 - DNA, 50 bp, Artificial Sequence
  Synthetic oligonucleotide
taggctctcctgggttctgtaaccccgccgtggtacccaggtcccattcg

SEQ ID NO: 589 - DNA, 50 bp, Artificial Sequence
  Synthetic oligonucleotide
cgctatccatcatccatgtgactgggcggaagtgcaggagagcaaggggg

SEQ ID NO: 590 - DNA, 50 bp, Artificial Sequence
  Synthetic oligonucleotide
cgctggatactgttttaagagccgcgcctttcaaaccgaaggggctcctt

SEQ ID NO: 591 - DNA, 50 bp, Artificial Sequence
  Synthetic oligonucleotide
aatattgatgcacatctgtcccccgctcaggtgtagaggggagctttgcg

SEQ ID NO: 592 - DNA, 50 bp, Artificial Sequence
  Synthetic oligonucleotide
cggccaatcgcagcgcgtctccgcctggccaggagtaagcccggccaata

SEQ ID NO: 593 - DNA, 50 bp, Artificial Sequence
  Synthetic oligonucleotide
cggggctggaggcttccaaggcctcactcaggctcttggcaagttagaac

SEQ ID NO: 594 - DNA, 50 bp, Artificial Sequence
  Synthetic oligonucleotide
cgaccaccgttcctgctcctctggcgggtgtcttaaatgtgctcttgtat

SEQ ID NO: 595 - DNA, 50 bp, Artificial Sequence
  Synthetic oligonucleotide
gccggaggagatgaaaccgtcttggctgcagtgtcgtaaagtcaccagcg

SEQ ID NO: 596 - DNA, 50 bp, Artificial Sequence
  Synthetic oligonucleotide
actaaagaaaatcacgttatattagaagccttaccctggtttcactttcg

SEQ ID NO: 597 - DNA, 50 bp, Artificial Sequence
  Synthetic oligonucleotide
acttttgcaactttgctacacactgaagccccttatatatcaattatgcg

SEQ ID NO: 598 - DNA, 50 bp, Artificial Sequence
  Synthetic oligonucleotide
cggcaggtcacgatttttaaatggacatgtccttaactcacgttgtggga

SEQ ID NO: 599 - DNA, 50 bp, Artificial Sequence
  Synthetic oligonucleotide
cgaaggcgcccagttgcgaaccctcctacagtcaggctgtctggagccat

SEQ ID NO: 600 - DNA, 50 bp, Artificial Sequence
  Synthetic oligonucleotide
cgcctccagacaattggagtgtacagccagggacacacagcagtgacaag

SEQ ID NO: 601 - DNA, 50 bp, Artificial Sequence
  Synthetic oligonucleotide
ctctcctaactgtagaaatcctttgatctcataaaacattttcattaacg

SEQ ID NO: 602 - DNA, 50 bp, Artificial Sequence
  Synthetic oligonucleotide
tctgtctgtgggactgtgggttctcagtggaattgttgcctttcttgtcg

SEQ ID NO: 603 - DNA, 50 bp, Artificial Sequence
  Synthetic oligonucleotide
cgtgccactaacgaactacagaagtatgaattgactcaagggggctggca

SEQ ID NO: 604 - DNA, 50 bp, Artificial Sequence
  Synthetic oligonucleotide
ccttcctagaccaaggggtcatctacggctctggacttcgataggactcg

SEQ ID NO: 605 - DNA, 50 bp, Artificial Sequence
  Synthetic oligonucleotide
cgtggcaacagtcagaagggtgggagcttctaggcaatttaacgcggcag

SEQ ID NO: 606 - DNA, 50 bp, Artificial Sequence
  Synthetic oligonucleotide
cgcccgcccaggagaaggcagctgctacctctgcctgcctcccgctgcgc

SEQ ID NO: 607 - DNA, 50 bp, Artificial Sequence
  Synthetic oligonucleotide
aggcctgcgcacggggaggctgttgtggcagcggaacagagacgtgcacg

SEQ ID NO: 608 - DNA, 50 bp, Artificial Sequence
  Synthetic oligonucleotide
cgggaccactccagcttgctactatggcccattcaagaaattgagtaggg

SEQ ID NO: 609 - DNA, 50 bp, Artificial Sequence
  Synthetic oligonucleotide
cgccacagtccagctgccacagcaggaccagccagtgccccacggcaccc

SEQ ID NO: 610 - DNA, 50 bp, Artificial Sequence
  Synthetic oligonucleotide
actatatagatgaagacatgaaacctctctacacagtgaactcccccacg

SEQ ID NO: 611 - DNA, 50 bp, Artificial Sequence
  Synthetic oligonucleotide
ccaagatcggtctcactgtaagtctgctatctgtattttcccattcttcg

SEQ ID NO: 612 - DNA, 50 bp, Artificial Sequence
  Synthetic oligonucleotide
cgctcaagtgcaggcctttctaaaggagctgctcagcaggcggcagccca

SEQ ID NO: 613 - DNA, 50 bp, Artificial Sequence
  Synthetic oligonucleotide
gaaaagcaatcttcaatgaattttaaacaattatggagactatttcctcg

SEQ ID NO: 614 - DNA, 50 bp, Artificial Sequence
  Synthetic oligonucleotide
cgccctggggaagccctgccagcctgttgctccgaaaaccgcataccagc

SEQ ID NO: 615 - DNA, 50 bp, Artificial Sequence
  Synthetic oligonucleotide
actccagaactgaaccagagttttcttgaggtgggatttactaggagtcg

SEQ ID NO: 616 - DNA, 50 bp, Artificial Sequence
  Synthetic oligonucleotide
tgtttcctaatttaagaggaccttcgccgggctagaacgtcagggattcg

SEQ ID NO: 617 - DNA, 50 bp, Artificial Sequence
  Synthetic oligonucleotide
cgtcgtcgtcgcccagcagcaagggctgcaaaatagtagaactcgtggtt

SEQ ID NO: 618 - DNA, 50 bp, Artificial Sequence
  Synthetic oligonucleotide
gtagggtgcaggaggttccacggacgcctcgacgaccggtagtagcttcg

SEQ ID NO: 619 - DNA, 50 bp, Artificial Sequence
  Synthetic oligonucleotide
cacaatgacatgtacaatgtcactgagaggagctggcgttgttgattccg

SEQ ID NO: 620 - DNA, 50 bp, Artificial Sequence
  Synthetic oligonucleotide
cgcaaccctccaagccccaggatccaaagtttccgtttgagaatctgcac

SEQ ID NO: 621 - DNA, 50 bp, Artificial Sequence
  Synthetic oligonucleotide
ttcccgttgacttcgctgcctatgtgcagctaggctggaagcagcaatcg

SEQ ID NO: 622 - DNA, 50 bp, Artificial Sequence
  Synthetic oligonucleotide
tcggaccgcggcagcaggagcagggccggggtcatccgtgtgaagcagcg

SEQ ID NO: 623 - DNA, 50 bp, Artificial Sequence
  Synthetic oligonucleotide
aatacgtagtaatttatccgttctcatgttctgtactatcagcacacacg

SEQ ID NO: 624 - DNA, 50 bp, Artificial Sequence
  Synthetic oligonucleotide
cgcttcagattgcgttctaggtctcttcccgcagctgcgacaattccccc

SEQ ID NO: 625 - DNA, 50 bp, Artificial Sequence
  Synthetic oligonucleotide
cgcccaccgagacccctggggtggagctgtgctaatagaaacatacccac

SEQ ID NO: 626 - DNA, 50 bp, Artificial Sequence
  Synthetic oligonucleotide
cggtaaagaagaagctaaatccttcctagacagaaggatcctgaagctga

SEQ ID NO: 627 - DNA, 50 bp, Artificial Sequence
  Synthetic oligonucleotide
agggcagcctgcgagaagcgctgagtcatggcaggagatcatccgagccg

SEQ ID NO: 628 - DNA, 50 bp, Artificial Sequence
  Synthetic oligonucleotide
cgccactgattaacttaaaacaaactcggctgcgtgtttgtgcgccgttg

SEQ ID NO: 629 - DNA, 50 bp, Artificial Sequence
  Synthetic oligonucleotide
aagcccctttacgtcggggtgggattccccttaaagccactgccaagacg

SEQ ID NO: 630 - DNA, 50 bp, Artificial Sequence
  Synthetic oligonucleotide
cgtcaattatggaggcttgggatgttaaaaggccaatatttttcagttgt

SEQ ID NO: 631 - DNA, 50 bp, Artificial Sequence
  Synthetic oligonucleotide
cggcgctttcaactgaaattgttggtggctctgaaaagagcctttggttt

SEQ ID NO: 632 - DNA, 50 bp, Artificial Sequence
  Synthetic oligonucleotide
tgggtgtctgggccggggcccctccaagcccacctgggagagcactcccg

SEQ ID NO: 633 - DNA, 50 bp, Artificial Sequence
  Synthetic oligonucleotide
cgcttcggccccacagtgcagttgtgcctaaaacaggtgagagtttgaac

SEQ ID NO: 634 - DNA, 50 bp, Artificial Sequence
  Synthetic oligonucleotide
tttctggattttgcgcggcctggcgctgggtgccacagccggtgaatgcg

SEQ ID NO: 635 - DNA, 50 bp, Artificial Sequence
  Synthetic oligonucleotide
cgctacccagttcccctgtgcaggccactgcgggccccctgccggactcc

SEQ ID NO: 636 - DNA, 50 bp, Artificial Sequence
  Synthetic oligonucleotide
ccccagtcggggtgctggagcccaagctggaagagttggagcacaggacg

SEQ ID NO: 637 - DNA, 50 bp, Artificial Sequence
  Synthetic oligonucleotide
accgaattccgggtggaaggacccagctgtattgaccttatataagctcg

SEQ ID NO: 638 - DNA, 50 bp, Artificial Sequence
  Synthetic oligonucleotide
cggaggccacccagagctcacagcctcctgccagcgcgctctctgtttct

SEQ ID NO: 639 - DNA, 50 bp, Artificial Sequence
  Synthetic oligonucleotide
ggatgctgagctgcgcgggatgctgagctgcggggggatgctgagctgcg

SEQ ID NO: 640 - DNA, 50 bp, Artificial Sequence
  Synthetic oligonucleotide
cggcagatgccgtgacagcgaccattgttcctggtagacacaggcgacca

SEQ ID NO: 641 - DNA, 50 bp, Artificial Sequence
  Synthetic oligonucleotide
aatgaccagcttttaatgtgactcctttaacctggtgtgctttaacaacg

SEQ ID NO: 642 - DNA, 50 bp, Artificial Sequence
  Synthetic oligonucleotide
gctgttcacaatgcgctccgccgggcggtggaaacttggctgcggtaacg

SEQ ID NO: 643 - DNA, 50 bp, Artificial Sequence
  Synthetic oligonucleotide
gccacgtccgggaggatgaacggagccccgctaaggtcgggaggacttcg

SEQ ID NO: 644 - DNA, 50 bp, Artificial Sequence
  Synthetic oligonucleotide
cggctaaaataaatacccttgtgaaatctatagttatatttaagtgcact

SEQ ID NO: 645 - DNA, 50 bp, Artificial Sequence
  Synthetic oligonucleotide
tcacggaggccggtaaatatgtaaacgtgggtttttcggtttccgtttcg

SEQ ID NO: 646 - DNA, 50 bp, Artificial Sequence
  Synthetic oligonucleotide
cggttcccaccttttgcactatggacattaggagtcagatcattctttgc

SEQ ID NO: 647 - DNA, 50 bp, Artificial Sequence
  Synthetic oligonucleotide
cgtgctttggattcaggttatttcagtttgattccagaacatttcagaaa

SEQ ID NO: 648 - DNA, 50 bp, Artificial Sequence
  Synthetic oligonucleotide
cgctctagtcacagcagcccaccatgcctgctcaggcctgggaaggggcc

SEQ ID NO: 649 - DNA, 50 bp, Artificial Sequence
  Synthetic oligonucleotide
cgcgtggccacgcagccctaacctggccctcttggattagaggggagctg

SEQ ID NO: 650 - DNA, 50 bp, Artificial Sequence
  Synthetic oligonucleotide
agccggcttaggactgcgcccgggatgggagaccagagcggctgctatcg

SEQ ID NO: 651 - DNA, 50 bp, Artificial Sequence
  Synthetic oligonucleotide
gccagtagtgataagcaagcctgggaaccatgagctctccttggatgtcg

SEQ ID NO: 652 - DNA, 50 bp, Artificial Sequence
  Synthetic oligonucleotide
atctatcttctcaccttgaggttccaaagatcataacggaaggggctgcg

SEQ ID NO: 653 - DNA, 50 bp, Artificial Sequence
  Synthetic oligonucleotide
gtcggtttcaggactccctcttttcaagctgccagaaacttgtctagtcg

SEQ ID NO: 654 - DNA, 50 bp, Artificial Sequence
  Synthetic oligonucleotide
tctgttctacccacggcggcggaagcgacgggggaactgaagacgaggcg

SEQ ID NO: 655 - DNA, 50 bp, Artificial Sequence
  Synthetic oligonucleotide
cgggtctccaggtgtcagaaagccaatccttacaaagttgagtgatccaa

SEQ ID NO: 656 - DNA, 50 bp, Artificial Sequence
  Synthetic oligonucleotide
ggccgccgggctccggatttgcagcctgaggcagagctcgggggctgtcg

SEQ ID NO: 657 - DNA, 50 bp, Artificial Sequence
  Synthetic oligonucleotide
cggatcccacccccacctgggcgccagacccatccagctgcttggagctc

SEQ ID NO: 658 - DNA, 50 bp, Artificial Sequence
  Synthetic oligonucleotide
tgcttgtctcccttgtctctccttagtaagcgatacgaatcccagcttcg

SEQ ID NO: 659 - DNA, 50 bp, Artificial Sequence
  Synthetic oligonucleotide
gtaggaaagttttcagggctcattactcgtggaatattgcgttccccacg

SEQ ID NO: 660 - DNA, 50 bp, Artificial Sequence
  Synthetic oligonucleotide
cgggggcctgcggatcagctctgactcttcctcggacatcgagtctgacc

SEQ ID NO: 661 - DNA, 50 bp, Artificial Sequence
  Synthetic oligonucleotide
aaaggcgttttctgccccctccgggcctcgggaatatttgtgggctgccg

SEQ ID NO: 662 - DNA, 50 bp, Artificial Sequence
  Synthetic oligonucleotide
tgctttatcctgagcttggtggaccagtttcctagtaggtggggttgccg

SEQ ID NO: 663 - DNA, 50 bp, Artificial Sequence
  Synthetic oligonucleotide
gcctccagctgggtctgtgcgcgcggcagagatgctgggcgtgggaaccg

SEQ ID NO: 664 - DNA, 50 bp, Artificial Sequence
  Synthetic oligonucleotide
cgccactgctgagcggttggaaggggaacactgcaggtacgccccagtca

SEQ ID NO: 665 - DNA, 50 bp, Artificial Sequence
  Synthetic oligonucleotide
gtagtagatgtttcctggctcctggatgagggccctggccagtcagaacg

SEQ ID NO: 666 - DNA, 50 bp, Artificial Sequence
  Synthetic oligonucleotide
caccacgcaaggactcgggaagcgggcaagtgggcaaaactctgcttccg

SEQ ID NO: 667 - DNA, 50 bp, Artificial Sequence
  Synthetic oligonucleotide
tgggcatctcggcgtggcctgcgccggggtcacggggagggctgtcagcg

SEQ ID NO: 668 - DNA, 50 bp, Artificial Sequence
  Synthetic oligonucleotide
aagggcatgataactgcttaagtatccacgtctctcatttaagactttcg

SEQ ID NO: 669 - DNA, 50 bp, Artificial Sequence
  Synthetic oligonucleotide
cgcgctggatttcaacctcaggaaacccgagaagggaaaatttccttgag

SEQ ID NO: 670 - DNA, 50 bp, Artificial Sequence
  Synthetic oligonucleotide
cgggcccctcacgccctacttgcaccagacccctcccacccgggccagcg

SEQ ID NO: 671 - DNA, 50 bp, Artificial Sequence
  Synthetic oligonucleotide
cgggtctacgcacctaggacccgctcgccctcctcacgtgcccacagctc

SEQ ID NO: 672 - DNA, 50 bp, Artificial Sequence
  Synthetic oligonucleotide
gttgccttggtgacggtggttgggctcggggtgtcccggtgtgccctgcg

SEQ ID NO: 673 - DNA, 50 bp, Artificial Sequence
  Synthetic oligonucleotide
caggaatggagtgtcccccagccctgcaattccgtggagcgctgaacacg

SEQ ID NO: 674 - DNA, 50 bp, Artificial Sequence
  Synthetic oligonucleotide
ctgcccgcggcccctcctgactgctagttggagcggggacagcatgggcg

SEQ ID NO: 675 - DNA, 50 bp, Artificial Sequence
  Synthetic oligonucleotide
ttgctacgaattgggcaagttctgcgccttgaaactgaactagtggctcg

SEQ ID NO: 676 - DNA, 50 bp, Artificial Sequence
  Synthetic oligonucleotide
gctccgcggcgggtgcctttcacacctgggtttccttcgtaattaattcg

SEQ ID NO: 677 - DNA, 50 bp, Artificial Sequence
  Synthetic oligonucleotide
tggcttcgtaccggtgactcgcgtcttggagattttaacactcctcaacg

SEQ ID NO: 678 - DNA, 50 bp, Artificial Sequence
  Synthetic oligonucleotide
cgccctgggcctccgcgccatattcctggtcccccgctcccggtgactcc

SEQ ID NO: 679 - DNA, 50 bp, Artificial Sequence
  Synthetic oligonucleotide
tcgagacggttctatccttttgcaaagaagccggaaagagctgggtcccg

SEQ ID NO: 680 - DNA, 50 bp, Artificial Sequence
  Synthetic oligonucleotide
cgcctgtgagggtcgctcctcagccgccgcgctcccactccgcgtcccca

SEQ ID NO: 681 - DNA, 50 bp, Artificial Sequence
  Synthetic oligonucleotide
cggccatgttctaacctgtaccactgggtggagggagagcaaatccttta

SEQ ID NO: 682 - DNA, 50 bp, Artificial Sequence
  Synthetic oligonucleotide
ctggtgttgacctagaggtgcctgttgtactatggtcaccgtctggaccg

SEQ ID NO: 683 - DNA, 50 bp, Artificial Sequence
  Synthetic oligonucleotide
cgccgccagccagccaaagctctctctacactggatcccggccccgtttc

SEQ ID NO: 684 - DNA, 50 bp, Artificial Sequence
  Synthetic oligonucleotide
ctgacaaacttgttctgcgggctgcggatgggtgcgagggtggaatctcg

SEQ ID NO: 685 - DNA, 50 bp, Artificial Sequence
  Synthetic oligonucleotide
ggagaaggcggagcgggggcggcctggagcgctgatcgggcgccgaaacg

SEQ ID NO: 686 - DNA, 50 bp, Artificial Sequence
  Synthetic oligonucleotide
ctgaggtcgggtgtcagggcgcgttgcggcctcgcgggtgggcagaggcg

SEQ ID NO: 687 - DNA, 50 bp, Artificial Sequence
  Synthetic oligonucleotide
cgctcccgccgtcacctccacctccaagcccagctagcctgggatctgcg

SEQ ID NO: 688 - DNA, 50 bp, Artificial Sequence
  Synthetic oligonucleotide
cggccccgctcttgaatctatctgaggaaacgcagcgaagaaacaagcag

SEQ ID NO: 689 - DNA, 50 bp, Artificial Sequence
  Synthetic oligonucleotide
cggcggcctgcacccggaactcacgctgcctcgggtcccaaaggctgaga

SEQ ID NO: 690 - DNA, 50 bp, Artificial Sequence
  Synthetic oligonucleotide
ggaggacaggcggctctgcgctgcggctgtggtgggctccgtgcacaccg

SEQ ID NO: 691 - DNA, 50 bp, Artificial Sequence
  Synthetic oligonucleotide
gagcaggtctgacatcttgctgggctttttcaaagagagccactgaaacg

SEQ ID NO: 692 - DNA, 50 bp, Artificial Sequence
  Synthetic oligonucleotide
cggcttcacaccagtcgttctggtcacttaggcgttcgcgtgagcgctca

SEQ ID NO: 693 - DNA, 50 bp, Artificial Sequence
  Synthetic oligonucleotide
cggccagactgttttcagagtagctgatccttaagtcactgtatgcttgc

SEQ ID NO: 694 - DNA, 50 bp, Artificial Sequence
  Synthetic oligonucleotide
cgcgtcattactgaggtggggcagaagcaacagttggttactcaccagat

SEQ ID NO: 695 - DNA, 50 bp, Artificial Sequence
  Synthetic oligonucleotide
cgctcgcgctctgctccgcgcccgccttgaccctgccgccctcgcagccc

SEQ ID NO: 696 - DNA, 50 bp, Artificial Sequence
  Synthetic oligonucleotide
cggtgcccatctcgcacccttccgcgttggcgggcacgcaccaccaccac

SEQ ID NO: 697 - DNA, 50 bp, Artificial Sequence
  Synthetic oligonucleotide
tgcaggttgggggcggaaagctgtttgcgattccctggactggttggtcg

SEQ ID NO: 698 - DNA, 50 bp, Artificial Sequence
  Synthetic oligonucleotide
aggataagtctgtggtgctaggacccagctcccagagtgccagactggcg

SEQ ID NO: 699 - DNA, 50 bp, Artificial Sequence
  Synthetic oligonucleotide
gctccagggagactcaccttccttctgagagggccgcaccccttgaggcg

SEQ ID NO: 700 - DNA, 50 bp, Artificial Sequence
  Synthetic oligonucleotide
ctcagtattcctgctggcattgtgacatgattgagcatggctcttgttcg

SEQ ID NO: 701 - DNA, 50 bp, Artificial Sequence
  Synthetic oligonucleotide
gcgcagctctccgtgccggcgtcccgggatttgtattgcatgcatgtacg

SEQ ID NO: 702 - DNA, 50 bp, Artificial Sequence
  Synthetic oligonucleotide
aaagtggggaaacccagaggcgggaggctcccagtggctgggcaagagcg

SEQ ID NO: 703 - DNA, 50 bp, Artificial Sequence
  Synthetic oligonucleotide
tcaggggcgctgggggcgccacaccaggtaaggggtccagcttgggagcg

SEQ ID NO: 704 - DNA, 50 bp, Artificial Sequence
  Synthetic oligonucleotide
gcagtcgggagactgagggttagggcgcggccgcggggtctcctgggccg

SEQ ID NO: 705 - DNA, 50 bp, Artificial Sequence
  Synthetic oligonucleotide
cgcgtgtgcccacacctgttttcccaggcagtcccctgaaaggggtggtg

SEQ ID NO: 706 - DNA, 50 bp, Artificial Sequence
  Synthetic oligonucleotide
cggatccatcctcaatgtccaggcaggactctcacatgaagccggtgctg

SEQ ID NO: 707 - DNA, 50 bp, Artificial Sequence
  Synthetic oligonucleotide
gggtctgtggcggcgcagcttacaccgcggtccccttatttggatctgcg

SEQ ID NO: 708 - DNA, 50 bp, Artificial Sequence
  Synthetic oligonucleotide
cgctgtgtggaaactccggtaaaactctttgggcaacagtcttatcacca

SEQ ID NO: 709 - DNA, 50 bp, Artificial Sequence
  Synthetic oligonucleotide
cgaagtgttcagaatccccgtgcattccagcgcgttgacactgaagtcac

SEQ ID NO: 710 - DNA, 50 bp, Artificial Sequence
  Synthetic oligonucleotide
cggggccctgtctggggtctctgggagagtcacccccaacttcctgcccc

SEQ ID NO: 711 - DNA, 50 bp, Artificial Sequence
  Synthetic oligonucleotide
cgctcccgccatagtcccaccaccggtgagcgccgcccccactcggctga

SEQ ID NO: 712 - DNA, 50 bp, Artificial Sequence
  Synthetic oligonucleotide
actttaaataaaaggctgatctgaccttctttttgcagaagatgaatccg

SEQ ID NO: 713 - DNA, 50 bp, Artificial Sequence
  Synthetic oligonucleotide
cttaaaccaaaggctcttttcagagccaccaacaatttcagttgaaagcg

SEQ ID NO: 714 - DNA, 50 bp, Artificial Sequence
  Synthetic oligonucleotide
cgccctggatagcgacttcagagaaggagcagaacacgtattcagagata

SEQ ID NO: 715 - DNA, 50 bp, Artificial Sequence
  Synthetic oligonucleotide
aattgagtgcgtgcacactcagtaaatgcgaaatggtttcatcacaaccg

SEQ ID NO: 716 - DNA, 50 bp, Artificial Sequence
  Synthetic oligonucleotide
ttgatggcggccgcgaacttggctgcagcggcagatctccgaccaaatcg

SEQ ID NO: 717 - DNA, 50 bp, Artificial Sequence
  Synthetic oligonucleotide
cgcggtctaatcaggctacagccacccatcagctccgccagggttaggga

SEQ ID NO: 718 - DNA, 50 bp, Artificial Sequence
  Synthetic oligonucleotide
cgcggcccaggaacagctaacgtgccgcttgctgcttgccaggtatggag

SEQ ID NO: 719 - DNA, 50 bp, Artificial Sequence
  Synthetic oligonucleotide
ttactgaattgtcttgttcagggacaagtggtgtctctcccagcttctcg

SEQ ID NO: 720 - DNA, 50 bp, Artificial Sequence
  Synthetic oligonucleotide
ctttgtcacctatccggcagaggtactcggcctttgccatcattgcatcg

SEQ ID NO: 721 - DNA, 50 bp, Artificial Sequence
  Synthetic oligonucleotide
ccagatcatcctattaccatcaccatgcctcattagagtggggactttcg

SEQ ID NO: 722 - DNA, 50 bp, Artificial Sequence
  Synthetic oligonucleotide
cgcctgaaggaagcccggcggactctgaagaatgctgctggcaaccagcg

SEQ ID NO: 723 - DNA, 50 bp, Artificial Sequence
  Synthetic oligonucleotide
cggccgaagcaccagcgatttctacttgggcttttccgctctacatgcag

SEQ ID NO: 724 - DNA, 50 bp, Artificial Sequence
  Synthetic oligonucleotide
cggtccaagtctttcaggctgtctgagctcttattcgggacacccaggca

SEQ ID NO: 725 - DNA, 50 bp, Artificial Sequence
  Synthetic oligonucleotide
gacgtataaggcagtccaggcccttcaggcaaagccctcttagttaagcg

SEQ ID NO: 726 - DNA, 50 bp, Artificial Sequence
  Synthetic oligonucleotide
tcctcaggtctgcccaagcagcttgtagctagcactgggccccgtgcgcg

SEQ ID NO: 727 - DNA, 50 bp, Artificial Sequence
  Synthetic oligonucleotide
cgcggaagcccctgcctagcgtctccccatggcccttggtacatcctccc

SEQ ID NO: 728 - DNA, 50 bp, Artificial Sequence
  Synthetic oligonucleotide
cgctgaccccagcagagaccctggctctgagcgagttcccagctctgtga

SEQ ID NO: 729 - DNA, 50 bp, Artificial Sequence
  Synthetic oligonucleotide
gccgtccatccattcgatggcctcgctgatgagcatagaagatgaacccg

SEQ ID NO: 730 - DNA, 50 bp, Artificial Sequence
  Synthetic oligonucleotide
cgcgggcgggctgccacatgaggtcatttcacaatcccccaggatcaggt

SEQ ID NO: 731 - DNA, 50 bp, Artificial Sequence
  Synthetic oligonucleotide
agccagcacccctgagtgtcactgaagttcctggatggggtgtgagtgcg

SEQ ID NO: 732 - DNA, 50 bp, Artificial Sequence
  Synthetic oligonucleotide
cgccccaggctccgccatggggaatgtgccatccgcggtgaagcactgcc

SEQ ID NO: 733 - DNA, 50 bp, Artificial Sequence
  Synthetic oligonucleotide
cggggccgcaggggaggcactgcggggacgggcggggtgagcgggagccg

SEQ ID NO: 734 - DNA, 50 bp, Artificial Sequence
  Synthetic oligonucleotide
gggtgactttcacgtgaagcccctgctgggggccttgctggggtaaatcg

SEQ ID NO: 735 - DNA, 50 bp, Artificial Sequence
  Synthetic oligonucleotide
aaaagcgacagctcaggtaagggcgcgccaggcaccctcgagagtgcgcg

SEQ ID NO: 736 - DNA, 50 bp, Artificial Sequence
  Synthetic oligonucleotide
cgccgcgtccacgatggcttcttgctctggagcccaccctgctttggctc

SEQ ID NO: 737 - DNA, 50 bp, Artificial Sequence
  Synthetic oligonucleotide
cgcagacctatgatgtggagaactggatcgccaaaatagagacctcttgg

SEQ ID NO: 738 - DNA, 50 bp, Artificial Sequence
  Synthetic oligonucleotide
cggccctgcctcatagcacggatcagctggggacccatgcgctcttcctg

SEQ ID NO: 739 - DNA, 50 bp, Artificial Sequence
  Synthetic oligonucleotide
aggacccgggaagcaggtgggcggaccacgcggggctgagaggatcaccg

SEQ ID NO: 740 - DNA, 50 bp, Artificial Sequence
  Synthetic oligonucleotide
tgggatttactacaggggaccaaatgatacattcaaccatattatcaacg

SEQ ID NO: 741 - DNA, 50 bp, Artificial Sequence
  Synthetic oligonucleotide
gcctgccatcgccatggtgacagcttcagaggctggaacaagcttaggcg

SEQ ID NO: 742 - DNA, 50 bp, Artificial Sequence
  Synthetic oligonucleotide
ggcagctttcctgggatatcacaccatatagactgagaatttcagaaacg

SEQ ID NO: 743 - DNA, 50 bp, Artificial Sequence
  Synthetic oligonucleotide
cggccctttgtggcccagatcaaaggacccgagcgccacaaaggcggccc

SEQ ID NO: 744 - DNA, 50 bp, Artificial Sequence
  Synthetic oligonucleotide
tctttctttattggtagcggccaaaaagagttgattgctattgggatccg

SEQ ID NO: 745 - DNA, 50 bp, Artificial Sequence; identical to SEQ ID NO: 581
  Synthetic oligonucleotide

SEQ ID NO: 746 - DNA, 50 bp, Artificial Sequence
  Synthetic oligonucleotide
cgggtggaagatcccccgcccaccagtatcctggatttacccaggtcgag

SEQ ID NO: 747 - DNA, 50 bp, Artificial Sequence
  Synthetic oligonucleotide
cagttgccctttgtgtgcctcagtttcctcacatggaacgttagatgacg

SEQ ID NO: 748 - DNA, 50 bp, Artificial Sequence
  Synthetic oligonucleotide
cggcccctgcggctctctgtggcccacccccgcgagccccatcccggaac

SEQ ID NO: 749 - DNA, 50 bp, Artificial Sequence
  Synthetic oligonucleotide
ccaaagactgtatggtctgttatctaactggtagccttatttgaccaacg

SEQ ID NO: 750 - DNA, 50 bp, Artificial Sequence
  Synthetic oligonucleotide
aagcaagtgacaaggacgcccgaagcacagtggacggtcatgaaggagcg

SEQ ID NO: 751 - DNA, 50 bp, Artificial Sequence
  Synthetic oligonucleotide
cgctcacacggtgtctaccggatctggcacggtcaagacacaggaacagc

SEQ ID NO: 752 - DNA, 50 bp, Artificial Sequence
  Synthetic oligonucleotide
cgctcctagaaaagagcacgacgcacccgatgctcggattggatgaagtg

SEQ ID NO: 753 - DNA, 50 bp, Artificial Sequence
  Synthetic oligonucleotide
cgctgcggagcgttttcgactttgcaaagctgttgatgttggtgggtcca

SEQ ID NO: 754 - DNA, 50 bp, Artificial Sequence
  Synthetic oligonucleotide
ctcctccggtagtctctctggactctccaagtgacttgctgggggcaccg

SEQ ID NO: 755 - DNA, 50 bp, Artificial Sequence
  Synthetic oligonucleotide
cgcctggcacgactactgggccgcgtcttgtcagtctatcagcttctgag

SEQ ID NO: 756 - DNA, 50 bp, Artificial Sequence
  Synthetic oligonucleotide
cgccatgcccgagctactcgcactgccttggtcccattcggttccccggg

SEQ ID NO: 757 - DNA, 50 bp, Artificial Sequence
  Synthetic oligonucleotide
gaaatttagaggccaggcctcgcatggggataatggatgggcacaggacg

SEQ ID NO: 758 - DNA, 50 bp, Artificial Sequence
  Synthetic oligonucleotide
cgcctggaaacccagccgcgtgggagagggcgaccccacctccaaccccc

SEQ ID NO: 759 - DNA, 50 bp, Artificial Sequence
  Synthetic oligonucleotide
cggcaccaatagccctgaaaattagggaacagcaggggctgccaaatata

SEQ ID NO: 760 - DNA, 50 bp, Artificial Sequence
  Synthetic oligonucleotide
tgggtgccgttcaccttccagcctaatccgtgagaaagcgagtgaaagcg

SEQ ID NO: 761 - DNA, 50 bp, Artificial Sequence
  Synthetic oligonucleotide
cggaatggtgctttcatttacatattagcaatataaagttatgattgtgt

SEQ ID NO: 762 - DNA, 50 bp, Artificial Sequence
  Synthetic oligonucleotide
cggaagctgatgtaggagcagctgaattcaccccagggcctgaaggtccg

SEQ ID NO: 763 - DNA, 50 bp, Artificial Sequence
  Synthetic oligonucleotide
aacaagggcgaggttcctggagcccaaactcaggcctcagccacccttcg

SEQ ID NO: 764 - DNA, 50 bp, Artificial Sequence
  Synthetic oligonucleotide
cgcccgcgagaccagcctcggccactggcctcccagggccaagacccacg

SEQ ID NO: 765 - DNA, 50 bp, Artificial Sequence
  Synthetic oligonucleotide
tctcgctgcagttcatggctttcggggagtgacacggcggctccaggacg

SEQ ID NO: 766 - DNA, 50 bp, Artificial Sequence
  Synthetic oligonucleotide
cgccctcggaggacgcatcctaatcacctcggcaaagagccgagccaggc

SEQ ID NO: 767 - DNA, 50 bp, Artificial Sequence
  Synthetic oligonucleotide
cggcccggcctggggacacactcccgcgccctccaggcccctgagctgtt

SEQ ID NO: 768 - DNA, 50 bp, Artificial Sequence
  Synthetic oligonucleotide
cgcccccaggcaggccgccacccagctccaggctgaccttgacgcgccgc

SEQ ID NO: 769 - DNA, 50 bp, Artificial Sequence
  Synthetic oligonucleotide
gcaaagtctccaaaaaggttacaagggttccagcgcctccccaagtcacg

SEQ ID NO: 770 - DNA, 50 bp, Artificial Sequence
  Synthetic oligonucleotide
agtcattaactggctgtcaggttcctcagatgatggagctaaaaatagcg

SEQ ID NO: 771 - DNA, 50 bp, Artificial Sequence
  Synthetic oligonucleotide
cggctccctcagcagcaccatggctagctttcatgcttgcctcaagattt

SEQ ID NO: 772 - DNA, 50 bp, Artificial Sequence
  Synthetic oligonucleotide
cggggtacctcgcgccccacgcgagtcagaacctaaagtgctctctgggc

SEQ ID NO: 773 - DNA, 50 bp, Artificial Sequence
  Synthetic oligonucleotide
cacatctggttctcgttaacttttctaaggcagcggccgctggagcagcg

SEQ ID NO: 774 - DNA, 50 bp, Artificial Sequence
  Synthetic oligonucleotide
cgctttggctgggttaatttttgtcgattgttcctcatcacactcagata

SEQ ID NO: 775 - DNA, 50 bp, Artificial Sequence
  Synthetic oligonucleotide
gcgcgttggaggggcgcctcggaccgggaggtatggggtcggtggcagcg

SEQ ID NO: 776 - DNA, 50 bp, Artificial Sequence
  Synthetic oligonucleotide
cgccatcaggagtcaggagtctggatatggaccaggaaagttgttctacc

SEQ ID NO: 777 - DNA, 50 bp, Artificial Sequence
  Synthetic oligonucleotide
tcactgaggtggcgctgaaacagctgacggagcgaagcctgacccagtcg

SEQ ID NO: 778 - DNA, 50 bp, Artificial Sequence
  Synthetic oligonucleotide
ctaggcgtcgaggcgagggttgagcctgtttggcttcagagaacgatgcg

SEQ ID NO: 779 - DNA, 50 bp, Artificial Sequence
  Synthetic oligonucleotide
cggccggagcccttggctccatagggcctctgcccaccatgggcttatga

SEQ ID NO: 780 - DNA, 50 bp, Artificial Sequence
  Synthetic oligonucleotide
cgtctgttctgatgccaccgcgagatggtccccgagctccccgagagtcc

SEQ ID NO: 781 - DNA, 50 bp, Artificial Sequence
  Synthetic oligonucleotide
tccttggactgataaagtcaatcactcactcctcgcacataaaccgagcg

SEQ ID NO: 782 - DNA, 50 bp, Artificial Sequence
  Synthetic oligonucleotide
agtggcacagggtgaaggcaaactcgatcgaagagccctccgagaaatcg

SEQ ID NO: 783 - DNA, 50 bp, Artificial Sequence
  Synthetic oligonucleotide
cgcaatttgtccattcgaaattgtctcgaagttgtctcgaaattgtcccg

SEQ ID NO: 784 - DNA, 50 bp, Artificial Sequence
  Synthetic oligonucleotide
cggccacctaccacccctgtcccctgaagataaatgatcgcagctgcaaa

SEQ ID NO: 785 - DNA, 50 bp, Artificial Sequence
  Synthetic oligonucleotide
ccggtcctgattgggggcgggggcggggagctcggagacccaaaggttcg

SEQ ID NO: 786 - DNA, 50 bp, Artificial Sequence
  Synthetic oligonucleotide
agggtgggctggctgggaaggatggcaatgcccattgctgacatccgccg

SEQ ID NO: 787 - DNA, 50 bp, Artificial Sequence
  Synthetic oligonucleotide
cggcactcccactcccacacctgtgcaaacatccgcccgctggccgggaa

SEQ ID NO: 788 - DNA, 50 bp, Artificial Sequence
  Synthetic oligonucleotide
ccattttttcactgggcctaattcttgacaatggttctgattctcattcg

SEQ ID NO: 789 - DNA, 50 bp, Artificial Sequence
  Synthetic oligonucleotide
cgccccacttgcctgggccgccgggcgctggaacctggaccctggaccct

SEQ ID NO: 790 - DNA, 50 bp, Artificial Sequence
  Synthetic oligonucleotide
tttaagtttttccttcatgatatgcctggagccccaggggtgacagctcg

SEQ ID NO: 791 - DNA, 50 bp, Artificial Sequence
  Synthetic oligonucleotide
cggggaaaggttttttaaaactcggtttcatactattattattactaagg

SEQ ID NO: 792 - DNA, 50 bp, Artificial Sequence
  Synthetic oligonucleotide
gctcccgggtggggctttcctggaggaatcagagagcaccaggtagctcg

SEQ ID NO: 793 - DNA, 50 bp, Artificial Sequence
  Synthetic oligonucleotide
cggactggcagtgtgctgctcttcaaagtaagagctagtgctataattat

SEQ ID NO: 794 - DNA, 50 bp, Artificial Sequence
  Synthetic oligonucleotide
gagggaacgtgtgggtctgccagggtcctgcaggggggatgagaccctcg

SEQ ID NO: 795 - DNA, 50 bp, Artificial Sequence
  Synthetic oligonucleotide
ttgcttttgcgttttgcctctggaaccattcgacatccgtggctgatgcg

SEQ ID NO: 796 - DNA, 50 bp, Artificial Sequence
  Synthetic oligonucleotide
cggagtagttctaagagggtaactgttagattctgtgtcaacctctgaga

SEQ ID NO: 797 - DNA, 50 bp, Artificial Sequence
  Synthetic oligonucleotide
gagaatctgagtcccggtgggtgcgtggggactttagaaccgggaccgcg

SEQ ID NO: 798 - DNA, 50 bp, Artificial Sequence
  Synthetic oligonucleotide
cggagtccgttgtatgtcgacttcccagggccgtaagcgaactttgtttt

SEQ ID NO: 799 - DNA, 50 bp, Artificial Sequence
  Synthetic oligonucleotide
cgcccccatgcggcctgcaagacacagccgggcctccatctctgcaggac

SEQ ID NO: 800 - DNA, 50 bp, Artificial Sequence
  Synthetic oligonucleotide
cgctgcgctcccgccatagtcccaccaccggtgagcgccgcccccactcg

SEQ ID NO: 801 - DNA, 50 bp, Artificial Sequence
  Synthetic oligonucleotide
cgccgaactcatgtctccgaggtgccacccgccagtgtcccgcccaaacc

SEQ ID NO: 802 - DNA, 50 bp, Artificial Sequence
  Synthetic oligonucleotide
agttaagccagttgggctacagatagctgcagatttctctctcaactccg

SEQ ID NO: 803 - DNA, 50 bp, Artificial Sequence
  Synthetic oligonucleotide
cggctcgggcaatcctgcgctaaagcccgctccccccgccgccagcaacg

SEQ ID NO: 804 - DNA, 50 bp, Artificial Sequence
  Synthetic oligonucleotide
cgcccgccaccaggagtacttctccccgcccggcgatccctgccgccgct

SEQ ID NO: 805 - DNA, 50 bp, Artificial Sequence
  Synthetic oligonucleotide
cgggaaccatgactccacggccatccggccccagggaggcgtttttccaa

SEQ ID NO: 806 - DNA, 50 bp, Artificial Sequence
  Synthetic oligonucleotide
cgcccctggcattcagggaatggtttgcaaatctcaatgcaccacagact

SEQ ID NO: 807 - DNA, 50 bp, Artificial Sequence
  Synthetic oligonucleotide
cgtgcagtttatttattatgagaagcctgactcaggcctttcctgtgtcc

SEQ ID NO: 808 - DNA, 50 bp, Artificial Sequence
  Synthetic oligonucleotide
cgcctccctgagacctgggagcacgtgcactggctttgaagactcccgaa

SEQ ID NO: 809 - DNA, 50 bp, Artificial Sequence
  Synthetic oligonucleotide
aggaagggcgcaggaggcttgggacctgggccccattcctggggcagacg

SEQ ID NO: 810 - DNA, 50 bp, Artificial Sequence
  Synthetic oligonucleotide
gggccagtcagggttctcactgatgtcttgggtgtggctctgagactgcg

SEQ ID NO: 811 - DNA, 50 bp, Artificial Sequence
  Synthetic oligonucleotide
agagagggcgaacgggacggggacttcctggaagattcctaccacacacg

SEQ ID NO: 812 - DNA, 50 bp, Artificial Sequence
  Synthetic oligonucleotide
accctgctaagcagttgtctccaggtcatgcaccttcagaatggaaagcg

SEQ ID NO: 813 - DNA, 50 bp, Artificial Sequence
  Synthetic oligonucleotide
gggattcggagcttccccagctggggtgagcctggcgttcccgggcggcg

SEQ ID NO: 814 - DNA, 50 bp, Artificial Sequence
  Synthetic oligonucleotide
tttcagggcccaattaattcgccgcgggcggtggggcggaggctgtgccg

SEQ ID NO: 815 - DNA, 50 bp, Artificial Sequence
  Synthetic oligonucleotide
cggttcagcattaaagttcaagtggagcggagggggctgcatatttttat

SEQ ID NO: 816 - DNA, 50 bp, Artificial Sequence
  Synthetic oligonucleotide
gaactgaagaaccgcgcaggaaaaggctgcctggaccagcgggacattcg

SEQ ID NO: 817 - DNA, 50 bp, Artificial Sequence
  Synthetic oligonucleotide
tgagagcgagggacacgggtgagtcacgcggcagaaactcacggcaagcg

SEQ ID NO: 818 - DNA, 50 bp, Artificial Sequence
  Synthetic oligonucleotide
ggcgagagcagggattgtcagcaactcgggctgcagaagcagcagcaacg

SEQ ID NO: 819 - DNA, 50 bp, Artificial Sequence
  Synthetic oligonucleotide
cggagcgaccaaggacaggctctcgctggcactcaggttgggttctctct

SEQ ID NO: 820 - DNA, 50 bp, Artificial Sequence
  Synthetic oligonucleotide
cacttcggagcagcctgttgggggtcgtaggctctgcaggctcagaagcg

SEQ ID NO: 821 - DNA, 50 bp, Artificial Sequence
  Synthetic oligonucleotide
cgcccaaggctcgggagaagggctctgcccttgttgcccgccttcacccg

SEQ ID NO: 822 - DNA, 50 bp, Artificial Sequence
  Synthetic oligonucleotide
cacagcaaccagcaccatgcccatgacactggggtactggaacatccgcg

SEQ ID NO: 823 - DNA, 50 bp, Artificial Sequence
  Synthetic oligonucleotide
aggggttgctggggtgaagctcggtggggcagccctgccgcctggctccg

SEQ ID NO: 824 - DNA, 50 bp, Artificial Sequence
  Synthetic oligonucleotide
agatgaggccagcggggaggcgggtgcgtgaactcttgggagattcttcg

SEQ ID NO: 825 - DNA, 50 bp, Artificial Sequence
  Synthetic oligonucleotide
cgcctcagtgtaagatggaaacaacactgatgtacaaggcctgtcatgat

SEQ ID NO: 826 - DNA, 50 bp, Artificial Sequence
  Synthetic oligonucleotide
tgcaaagcattatctgtggctgagcccatcacaattcaacaaagattacg

SEQ ID NO: 827 - DNA, 50 bp, Artificial Sequence
  Synthetic oligonucleotide
cgggcaagtttggctcagtccttgtcgatgctccaggctcggcttccctg

SEQ ID NO: 828 - DNA, 50 bp, Artificial Sequence
  Synthetic oligonucleotide
cgccgcagcacgtgaccgcccacatgaccgcctccgccaatctcagcagt

SEQ ID NO: 829 - DNA, 50 bp, Artificial Sequence
  Synthetic oligonucleotide
cggcccccacatagggccagactcaccccctggggacccccctgtcaatc

SEQ ID NO: 830 - DNA, 50 bp, Artificial Sequence
  Synthetic oligonucleotide
cgcggccttgctgctgcgcctccaaagatcgcgcaccagtctggcccaca

SEQ ID NO: 831 - DNA, 50 bp, Artificial Sequence
  Synthetic oligonucleotide
tttagagactctcctggtgttcacagctcatcgttgtaaatgaggggtcg

SEQ ID NO: 832 - DNA, 50 bp, Artificial Sequence
  Synthetic oligonucleotide
cgctcctctacaaggagcactcgaaattttgccgtgggccgcctgcggag

SEQ ID NO: 833 - DNA, 50 bp, Artificial Sequence
  Synthetic oligonucleotide
cgatcctgaatgaatgaatggatggacaaagcgacgaaagaacgcagtga

SEQ ID NO: 834 - DNA, 50 bp, Artificial Sequence
  Synthetic oligonucleotide
cgcttcatctcaaaaccgtctggtgctgaggaagtggcccaagatggacg

SEQ ID NO: 835 - DNA, 50 bp, Artificial Sequence
  Synthetic oligonucleotide
ctagaaatgcgcgtgcaatctacacatctcatatgaccgggacacaatcg

SEQ ID NO: 836 - DNA, 50 bp, Artificial Sequence
  Synthetic oligonucleotide
tgaatggcaggagctgcaccagggggctgtgcgcgctgcgcgggtgtgcg

SEQ ID NO: 837 - DNA, 50 bp, Artificial Sequence
  Synthetic oligonucleotide
gcaggtctattccgccgcttgggcaaacaggcgggttagtgcactccacg

SEQ ID NO: 838 - DNA, 50 bp, Artificial Sequence
  Synthetic oligonucleotide
ggatggacggagtaggggttcccgcttccatgtacggagaccctcacgcg

SEQ ID NO: 839 - DNA, 50 bp, Artificial Sequence
  Synthetic oligonucleotide
cggaccagcactccactgtgggtccaaggatgagctccaaagagcccagt

SEQ ID NO: 840 - DNA, 50 bp, Artificial Sequence
  Synthetic oligonucleotide
cctgccccggggaatgcgaggctgcttcccttctgcgtaatcagggtacg

SEQ ID NO: 841 - DNA, 50 bp, Artificial Sequence
  Synthetic oligonucleotide
aagctttctttgggtgaggcagggccgtcctgcccaaagcccctcctccg

SEQ ID NO: 842 - DNA, 50 bp, Artificial Sequence
  Synthetic oligonucleotide
cggagccttaacccttcaaatacccccaggagagccccagccggggcctc

SEQ ID NO: 843 - DNA, 50 bp, Artificial Sequence
  Synthetic oligonucleotide
tgctcgcagtggcctgggccagcggcagggtgagccgagcctctgctgcg

SEQ ID NO: 844 - DNA, 50 bp, Artificial Sequence
  Synthetic oligonucleotide
cggagggcccccgtctccagagagagccaaagagtcaggctgactgcttt

SEQ ID NO: 845 - DNA, 50 bp, Artificial Sequence
  Synthetic oligonucleotide
atgtagtgttaacggaagagtttaggtcctgcctcactgtccgggaaacg

SEQ ID NO: 846 - DNA, 50 bp, Artificial Sequence
  Synthetic oligonucleotide
gctagctcttcttctcccaggtggtgacaatgcagacggtaagaacatcg

SEQ ID NO: 847 - DNA, 50 bp, Artificial Sequence
  Synthetic oligonucleotide
caagacgacggcgtgcaggctggttgccttggtgacggtggttgggctcg

SEQ ID NO: 848 - DNA, 50 bp, Artificial Sequence
  Synthetic oligonucleotide
tccctttcccactttgttctgggaggcagtcgaggggctccccgtgatcg

SEQ ID NO: 849 - DNA, 50 bp, Artificial Sequence
  Synthetic oligonucleotide
tgcttccagggcttggtttcgctttgcctggctcttggctaggcctggcg

SEQ ID NO: 850 - DNA, 50 bp, Artificial Sequence
  Synthetic oligonucleotide
gaggcagctggggcgggggtggccgcgggagcgtcttgcccgtgtgatcg

SEQ ID NO: 851 - DNA, 50 bp, Artificial Sequence
  Synthetic oligonucleotide
tcatggccacgaaggcatcgtggtagtgccgcttggagttgtgggccacg

SEQ ID NO: 852 - DNA, 50 bp, Artificial Sequence
  Synthetic oligonucleotide
cattccaccccccttgtttccgcattcatcctgagtggctggtgggaacg

SEQ ID NO: 853 - DNA, 50 bp, Artificial Sequence
  Synthetic oligonucleotide
tcggctgtgatggggagcccggagcagccaggcggcgagcagtagcggcg

SEQ ID NO: 854 - DNA, 50 bp, Artificial Sequence
  Synthetic oligonucleotide
gctggtactgctgggggtaccgagtctcctctgctttggcaaaatccacg

SEQ ID NO: 855 - DNA, 50 bp, Artificial Sequence
  Synthetic oligonucleotide
cgcaaagctgctctctcactccgtggagttggatctctacccccgcagcc

SEQ ID NO: 856 - DNA, 50 bp, Artificial Sequence
  Synthetic oligonucleotide
gaggggcacacgccggagcagctccagcctgggagcattgggcgtgaacg

SEQ ID NO: 857 - DNA, 50 bp, Artificial Sequence
  Synthetic oligonucleotide
gacggggatagcgagctgagtgtgcgagcgccaggggttccagctgcacg

SEQ ID NO: 858 - DNA, 50 bp, Artificial Sequence
  Synthetic oligonucleotide
acaaaacaggcactctctggcctaggagtggaatccatcctcaattttcg

SEQ ID NO: 859 - DNA, 50 bp, Artificial Sequence
  Synthetic oligonucleotide
cgggatcctgctgggggctacagcccaaacatgttacttttccaactgtt

SEQ ID NO: 860 - DNA, 50 bp, Artificial Sequence
  Synthetic oligonucleotide
cggcagaggtactcggcctttgccatcattgcatcgcgaatttcgctctc

SEQ ID NO: 861 - DNA, 50 bp, Artificial Sequence
  Synthetic oligonucleotide
cttgaagcctgctcggagcttgggattgtattttctttggctttctggcg

SEQ ID NO: 862 - DNA, 50 bp, Artificial Sequence
  Synthetic oligonucleotide
cacagacggctgctgctccaccctgggggccctgcagggatcaggtgccg

SEQ ID NO: 863 - DNA, 50 bp, Artificial Sequence
  Synthetic oligonucleotide
cgcccacagcccaattccccaggcgcagcgagcgcctgcagcccgaaagc

SEQ ID NO: 864 - DNA, 50 bp, Artificial Sequence
  Synthetic oligonucleotide
cgcagacttgggtcccttccggacgcagcccgcgtgctccccgagctatt

SEQ ID NO: 865 - DNA, 50 bp, Artificial Sequence
  Synthetic oligonucleotide
agttcacaccgtacgggtcggctcagagatgaagccaaaaccttgggtcg

SEQ ID NO: 866 - DNA, 50 bp, Artificial Sequence
  Synthetic oligonucleotide
ggatggcggcgggtggggagtgcgcctgcacgtgtgtgcgcgcgggtgcg

SEQ ID NO: 867 - DNA, 50 bp, Artificial Sequence
  Synthetic oligonucleotide
accggaattacagcatttcttggtagaggaaactatccctcagccaaccg

SEQ ID NO: 868 - DNA, 50 bp, Artificial Sequence
  Synthetic oligonucleotide
ctgaggcaccctggaaaagttccctacttccaaagtctgcaggagcttcg

SEQ ID NO: 869 - DNA, 50 bp, Artificial Sequence
  Synthetic oligonucleotide
cggggaacccctcctccggggccctggcaagatgctggctctgttgccct

SEQ ID NO: 870 - DNA, 50 bp, Artificial Sequence
  Synthetic oligonucleotide
cggccgactggggtcctgtcctcttgtcaccttgtatccctcgcatgctc

SEQ ID NO: 871 - DNA, 50 bp, Artificial Sequence
  Synthetic oligonucleotide
cgggcatgtctctggaggaagaaattcaaaatcacaataataaaacgtgc

SEQ ID NO: 872 - DNA, 50 bp, Artificial Sequence
  Synthetic oligonucleotide
tgcaggcacccccgcgtgtatgggtgtgagtgtgcacgtgtgcctgtgcg

SEQ ID NO: 873 - DNA, 50 bp, Artificial Sequence
  Synthetic oligonucleotide
ccttctccacatgctttttggtggtggggggatgtggcttcccaaggccg

SEQ ID NO: 874 - DNA, 50 bp, Artificial Sequence
  Synthetic oligonucleotide
ttctgacaggcttttccttcatcggtggcctttgactccagctgacttcg

SEQ ID NO: 875 - DNA, 50 bp, Artificial Sequence
  Synthetic oligonucleotide
tttcataacctggcgagaatcactgagcgctatgaggccaccgcctgacg

SEQ ID NO: 876 - DNA, 50 bp, Artificial Sequence
  Synthetic oligonucleotide
cggagcccccgatccctccgggtctagcgcaggccccacggggccccttc

SEQ ID NO: 877 - DNA, 50 bp, Artificial Sequence
  Synthetic oligonucleotide
ggatcgcttcagaacttcagcaaacattccacgaggacttctcggtgccg

SEQ ID NO: 878 - DNA, 50 bp, Artificial Sequence
  Synthetic oligonucleotide
ctgtcttataccagccctgtgcggccaggcaggaaggcttccgtggtgcg

SEQ ID NO: 879 - DNA, 50 bp, Artificial Sequence
  Synthetic oligonucleotide
atcgctaacatggagaggcaacaggctagaagagtccctgtcttggagcg

SEQ ID NO: 880 - DNA, 50 bp, Artificial Sequence
  Synthetic oligonucleotide
cgcatttgttgctcatggcgctcgccccgttccaggcctccctggtgccc

SEQ ID NO: 881 - DNA, 50 bp, Artificial Sequence
  Synthetic oligonucleotide
cgctggatcctctccacatccaggccgcgtccactggctttccaacctgc

SEQ ID NO: 882 - DNA, 50 bp, Artificial Sequence
  Synthetic oligonucleotide
cggcttcttgagagcagggctggactctgctgcatggttggagaagctct

SEQ ID NO: 883 - DNA, 50 bp, Artificial Sequence
  Synthetic oligonucleotide
cgcggagactcactaccccgacatctacactcgggaggagctggccctga

SEQ ID NO: 884 - DNA, 50 bp, Artificial Sequence
  Synthetic oligonucleotide
tcctgcccaagactgtgacttctgaccacctgtactttaaaaccagaacg

SEQ ID NO: 885 - DNA, 50 bp, Artificial Sequence
  Synthetic oligonucleotide
cgaggccgatagctgggatggggctgaagagccctggctctgttttaccg

SEQ ID NO: 886 - DNA, 50 bp, Artificial Sequence
  Synthetic oligonucleotide
cggccccaggatggcccgcccgtctgccctccgccttgccccgcccaccc

SEQ ID NO: 887 - DNA, 50 bp, Artificial Sequence
  Synthetic oligonucleotide
tgagctgcgtgtctgcactctgaaatgggcacatgagccctggagatccg

SEQ ID NO: 888 - DNA, 50 bp, Artificial Sequence
  Synthetic oligonucleotide
tcttacggggtaacctgtcaagaactgtcaaatacaattttagggagtcg

SEQ ID NO: 889 - DNA, 50 bp, Artificial Sequence
  Synthetic oligonucleotide
ccctgcagaagcgtcccgacggccacatcgtgagtgtgaggtgaggagcg

SEQ ID NO: 890 - DNA, 50 bp, Artificial Sequence
  Synthetic oligonucleotide
cggaggaacgttaggagactagggaaagacctctgccattggactttaag

SEQ ID NO: 891 - DNA, 50 bp, Artificial Sequence
  Synthetic oligonucleotide
ggctctccccttgggcggagtggggcgcggtggggaacacagcttggacg

SEQ ID NO: 892 - DNA, 50 bp, Artificial Sequence
  Synthetic oligonucleotide
cgacgcctcagcccggggaagacttgcacagtacacatttagcgaggatg

SEQ ID NO: 893 - DNA, 50 bp, Artificial Sequence
  Synthetic oligonucleotide
caagcggcgccaccggattccatttgtaaacttattagtgtgcgctcgcg

SEQ ID NO: 894 - DNA, 50 bp, Artificial Sequence
  Synthetic oligonucleotide
cgcactggcccaaggggcagagaacatcagaaggaacctggcacataact

SEQ ID NO: 895 - DNA, 50 bp, Artificial Sequence
  Synthetic oligonucleotide
cgcctagaaggctgctgggaccccagacccagagccccggtcacactccc

SEQ ID NO: 896 - DNA, 50 bp, Artificial Sequence
  Synthetic oligonucleotide
cccgctcactggggagcagccagggcaggcctacctggcaagggccagcg

SEQ ID NO: 897 - DNA, 50 bp, Artificial Sequence
  Synthetic oligonucleotide
tcgtagccttggaaacggctaaacagcagcgggacgcgggtgcgcatgcg

SEQ ID NO: 898 - DNA, 50 bp, Artificial Sequence
  Synthetic oligonucleotide
cgccatcagccttcctgggcctgagcggtcagctgtttcggaaagtccag

SEQ ID NO: 899 - DNA, 50 bp, Artificial Sequence
  Synthetic oligonucleotide
ctgcctgcggctggaggcggcagggattccggagttgggggatcctgacg

SEQ ID NO: 900 - DNA, 50 bp, Artificial Sequence
  Synthetic oligonucleotide
taagtctttaagttattaatacaacgacaactatataactccagttaccg

SEQ ID NO: 901 - DNA, 50 bp, Artificial Sequence
  Synthetic oligonucleotide
cgtgcttaatgcttggctgtctggtaaggaaaataaagtggtgcattttg

SEQ ID NO: 902 - DNA, 50 bp, Artificial Sequence
  Synthetic oligonucleotide
tggggtaagttggtatacggttcagctagcacactggcattttctctacg

SEQ ID NO: 903 - DNA, 50 bp, Artificial Sequence
  Synthetic oligonucleotide
cgcctaaatcttggccaccagcgcaaacatatgtcacccggccctggagc

SEQ ID NO: 904 - DNA, 50 bp, Artificial Sequence
  Synthetic oligonucleotide
caacatagcgaaaacccatctctacaaaaaacaatagaattagctggccg

SEQ ID NO: 905 - DNA, 50 bp, Artificial Sequence
  Synthetic oligonucleotide
ctggccagttggctgagggtggccgctcagagtttgaagtacacatatcg

SEQ ID NO: 906 - DNA, 50 bp, Artificial Sequence
  Synthetic oligonucleotide
acttgggtatgtttcttatgaatattacacgcggagcagcgtctggtccg

SEQ ID NO: 907 - DNA, 50 bp, Artificial Sequence
  Synthetic oligonucleotide
cgcttccggccccgccctcagcagacagcggagctctcactccacccggc

SEQ ID NO: 908 - DNA, 50 bp, Artificial Sequence
  Synthetic oligonucleotide
cggcggtcacattctaagtctaggagtcggcgacgatccaaaagcccaag

SEQ ID NO: 909 - DNA, 50 bp, Artificial Sequence
  Synthetic oligonucleotide
tggggtggggcctgctctctaggggactctcaagctcttggaaggtcacg

SEQ ID NO: 910 - DNA, 50 bp, Artificial Sequence
  Synthetic oligonucleotide
gtcatgggcatggtgctggttgctgtggattctgcagacaggcctcagcg

SEQ ID NO: 911 - DNA, 50 bp, Artificial Sequence
  Synthetic oligonucleotide
cggccagtcttgccagcacgcgagcccctccgcactcaccagtccctctt

SEQ ID NO: 912 - DNA, 50 bp, Artificial Sequence
  Synthetic oligonucleotide
gcaccctggattcaggcctgggtggcttgaattgagcctcagaagagccg

SEQ ID NO: 913 - DNA, 50 bp, Artificial Sequence
  Synthetic oligonucleotide
cgcccctcactcgctctggcagccagaggccttgttcgagggcctggagc

SEQ ID NO: 914 - DNA, 50 bp, Artificial Sequence
  Synthetic oligonucleotide
gggacgaggcagaggggtcggccgcggaggggcaggcggtgcccggctcg

SEQ ID NO: 915 - DNA, 50 bp, Artificial Sequence
  Synthetic oligonucleotide
agaatttcttttaaatccctatgaagttaaattccaaaatgtcaccttcg

SEQ ID NO: 916 - DNA, 50 bp, Artificial Sequence
  Synthetic oligonucleotide
gaggtgggatcttgggtgcctggtgatcccagtgtgtggggctgggaacg

SEQ ID NO: 917 - DNA, 50 bp, Artificial Sequence
  Synthetic oligonucleotide
cggggatcgcaacctccagcccgtgggcaacgcgttcagcccaagacccc

SEQ ID NO: 918 - DNA, 50 bp, Artificial Sequence
  Synthetic oligonucleotide
cggtactaggaagagggttaacagaacaggacactaaaaacaaagtacta

SEQ ID NO: 919 - DNA, 50 bp, Artificial Sequence
  Synthetic oligonucleotide
ggggaagctcgtggcgctggtcctgctgggggtcggcctgtccttagtcg

SEQ ID NO: 920 - DNA, 50 bp, Artificial Sequence
  Synthetic oligonucleotide
ctgcgttctggagcttatcaacacagtggataattaaaatcataaacacg

SEQ ID NO: 921 - DNA, 50 bp, Artificial Sequence
  Synthetic oligonucleotide
cgcagccccagacccacaggccgaagcaataaccagccagataaagtttc

SEQ ID NO: 922 - DNA, 50 bp, Artificial Sequence
  Synthetic oligonucleotide
cggctcgccctttgggatccacagctaagaactggccaggaacgatgcga

SEQ ID NO: 923 - DNA, 50 bp, Artificial Sequence
  Synthetic oligonucleotide
gtaactccccaaatgacttcagttaactgggccttgaatcacaaggatcg

SEQ ID NO: 924 - DNA, 50 bp, Artificial Sequence
  Synthetic oligonucleotide
aaatcgcctttggcgtgtgcagctcgagcgttacaacgatgcaaagtgcg

SEQ ID NO: 925 - DNA, 50 bp, Artificial Sequence
  Synthetic oligonucleotide
cgcagaagtctatgaaaatgtgtttgttgaggagtcactcgccccagtaa

SEQ ID NO: 926 - DNA, 50 bp, Artificial Sequence
  Synthetic oligonucleotide
cgcaccccacctccgtctccacagtgtagccctcagcctgagatgctgag

SEQ ID NO: 927 - DNA, 50 bp, Artificial Sequence
  Synthetic oligonucleotide
gcggcagaggtgccctggttgggcggctgggcgcctggggttcgacgccg

SEQ ID NO: 928 - DNA, 50 bp, Artificial Sequence
  Synthetic oligonucleotide
cggccgccccgtcgaacctttgggtctccgagctccccgcccccgccccc

SEQ ID NO: 929 - DNA, 50 bp, Artificial Sequence
  Synthetic oligonucleotide
cgcacaatataaaaacgctgcaacaatggaaggaagaaaggtttgggttg

SEQ ID NO: 930 - DNA, 50 bp, Artificial Sequence
  Synthetic oligonucleotide
cgagatgaaaggatcctggctaatttctttgaccactgtcttgcaaatgt

SEQ ID NO: 931 - DNA, 50 bp, Artificial Sequence
  Synthetic oligonucleotide
cgaaagtgaaggaatcaagtctggcctatcatcttcagacggctgtacac

SEQ ID NO: 932 - DNA, 50 bp, Artificial Sequence
  Synthetic oligonucleotide
cttttgcgaaaggggcgtctttcttcgtcgtggaagggaccctcactccg

SEQ ID NO: 933 - DNA, 50 bp, Artificial Sequence
  Synthetic oligonucleotide
gcacgtgtgtgggcgtcactggcgccctctatgtgggcggaaatcatccg

SEQ ID NO: 934 - DNA, 50 bp, Artificial Sequence
  Synthetic oligonucleotide
cgcgctgccccgcactctgagggccttcattagctcgctccccgcgccga

SEQ ID NO: 935 - DNA, 50 bp, Artificial Sequence
  Synthetic oligonucleotide
cttccctgagtgcttgccgagaaggctgagcaaacccacagcaggatccg

SEQ ID NO: 936 - DNA, 50 bp, Artificial Sequence
  Synthetic oligonucleotide
atttcttttgttacctgtgatccgggcggggggctcctttcggccgctcg

SEQ ID NO: 937 - DNA, 50 bp, Artificial Sequence
  Synthetic oligonucleotide
gcagttcaataccagcagcaaaacgcaggtttttgggggaactcccgccg

SEQ ID NO: 938 - DNA, 50 bp, Artificial Sequence
  Synthetic oligonucleotide
cgccccgatggctgagccgcggcaacaccgcgtccttaagccccatcctc

SEQ ID NO: 939 - DNA, 50 bp, Artificial Sequence
  Synthetic oligonucleotide
gcccggggcgctgtggcttgatttgcaggtggttaggtggttgtcgtccg

SEQ ID NO: 940 - DNA, 50 bp, Artificial Sequence
  Synthetic oligonucleotide
cgccccccgcaactaccaagcagctgccggcgccgcagcgggaacagacc

SEQ ID NO: 941 - DNA, 50 bp, Artificial Sequence
  Synthetic oligonucleotide
cgcctttgcgctcagctccccgctggccgcgagctctccaggcactcctg

SEQ ID NO: 942 - DNA, 50 bp, Artificial Sequence
  Synthetic oligonucleotide
cggggtcgccactgcgcccagctgcagaaagcactccgcacccccagcaa

SEQ ID NO: 943 - DNA, 50 bp, Artificial Sequence
  Synthetic oligonucleotide
ggcggccgcggcggctggactcacggggtggtggtggtggtgcggatgcg

SEQ ID NO: 944 - DNA, 50 bp, Artificial Sequence
  Synthetic oligonucleotide
ggcaaagcgaaaccaagccctggaagcagatccggtgcgggtgacagccg

SEQ ID NO: 945 - DNA, 50 bp, Artificial Sequence
  Synthetic oligonucleotide
cgcccccccaggctgagccacgttgagtaaatgcatgtgcacggtcaggt

SEQ ID NO: 946 - DNA, 50 bp, Artificial Sequence
  Synthetic oligonucleotide
aattaatttataaatctgcgtccaattaggcaagatgcttttaaatctcg

SEQ ID NO: 947 - DNA, 50 bp, Artificial Sequence
  Synthetic oligonucleotide
cgcgacgctgatttatggtccagtcgctcgcttgaaccccaacgctttgg

SEQ ID NO: 948 - DNA, 50 bp, Artificial Sequence
  Synthetic oligonucleotide
cgggatggccctccgcctacaccgaaaagagaacagaccacagccttact

SEQ ID NO: 949 - DNA, 50 bp, Artificial Sequence
  Synthetic oligonucleotide
ataccaccttgtacacacatgaacacagaagtgccgggtaaccgcgatcg

SEQ ID NO: 950 - DNA, 50 bp, Artificial Sequence
  Synthetic oligonucleotide
tattcgctgaacgtagggaagtgtcccaaagaaacgcggctcccagtgcg

SEQ ID NO: 951 - DNA, 50 bp, Artificial Sequence
  Synthetic oligonucleotide
tgctgggggctgcgtggctggcgggcccggcccgcgggcagaatgagacg

SEQ ID NO: 952 - DNA, 50 bp, Artificial Sequence
  Synthetic oligonucleotide
cgccgagaggtgctgtggaagggttcacgctcaccgcatgggggacctcg

SEQ ID NO: 953 - DNA, 50 bp, Artificial Sequence
  Synthetic oligonucleotide
cgcggtccacccattggcgggagaggactcacagaccgcagctcctcacc

SEQ ID NO: 954 - DNA, 50 bp, Artificial Sequence
  Synthetic oligonucleotide
accctaaaattttcttctgatttctggagaccgaggagtttaccacttcg

SEQ ID NO: 955 - DNA, 50 bp, Artificial Sequence
  Synthetic oligonucleotide
cggcctttgcgcagccggtccctaccctggaaggagaaaatcaatccgcg

SEQ ID NO: 956 - DNA, 50 bp, Artificial Sequence
  Synthetic oligonucleotide
actaaaggtggatacctccttcacatggtgtttgctataagggtcaaacg

SEQ ID NO: 957 - DNA, 50 bp, Artificial Sequence
  Synthetic oligonucleotide
cgcgcacatccccggcttccccgggctccgcgccttcccaagagccccgt

SEQ ID NO: 958 - DNA, 50 bp, Artificial Sequence
  Synthetic oligonucleotide
acgtgggcatgtcttggcccctcttgggctattaacttgattgactcacg

SEQ ID NO: 959 - DNA, 50 bp, Artificial Sequence
  Synthetic oligonucleotide
gaccatgtggcaggaaggctgcctggttctgcacatctggccccttcccg

SEQ ID NO: 960 - DNA, 50 bp, Artificial Sequence
  Synthetic oligonucleotide
cgcttccttacgtggctaataaaggggtgcttacagagcatggaaaaaca

SEQ ID NO: 961 - DNA, 50 bp, Artificial Sequence
  Synthetic oligonucleotide
cggggaaatggaagacaaaggaaatggggggacatagcaacccctattct

SEQ ID NO: 962 - DNA, 50 bp, Artificial Sequence
  Synthetic oligonucleotide
gaggggctgcggctccggggctcgggtcgttttgagttcctatctttgcg

SEQ ID NO: 963 - DNA, 50 bp, Artificial Sequence
  Synthetic oligonucleotide
cgctcttaatgagaacacaattacccagatggagagggagcctcacccct

SEQ ID NO: 964 - DNA, 50 bp, Artificial Sequence
  Synthetic oligonucleotide
gaggatctcggcgaagcggaaggctttggtgccagctgggagagtctgcg

SEQ ID NO: 965 - DNA, 50 bp, Artificial Sequence
  Synthetic oligonucleotide
cgggcgtgccagcctggagctgtccaacttttcagcagctccgggatcag

SEQ ID NO: 966 - DNA, 50 bp, Artificial Sequence
  Synthetic oligonucleotide
ctcactcccattgagtgtcgggtttctagagaagccaatcaatgtagccg

SEQ ID NO: 967 - DNA, 50 bp, Artificial Sequence
  Synthetic oligonucleotide
cgccccaggacctgcaccctctaccggccacgggacgtccctccgcaccc

SEQ ID NO: 968 - DNA, 50 bp, Artificial Sequence
  Synthetic oligonucleotide
ctgagggaccccggccaggcgcggagatgggggtgcacggtgagtactcg

SEQ ID NO: 969 - DNA, 50 bp, Artificial Sequence
  Synthetic oligonucleotide
cgctcacgcagcacttctggcagtccctgaaggaccactacctcaagtct

SEQ ID NO: 970 - DNA, 50 bp, Artificial Sequence
  Synthetic oligonucleotide
cggtgcagtggtgggggctgcccagcatctacatcgaggcctgggtgtcg

SEQ ID NO: 971 - DNA, 50 bp, Artificial Sequence
  Synthetic oligonucleotide
ccgagagcggttgggtcagcggcttcatggtgcagccgagtctcaaagcg

SEQ ID NO: 972 - DNA, 50 bp, Artificial Sequence
  Synthetic oligonucleotide
cgcctggggtcttgcgtccactggcctggaaagcgagggctatgcccccc

SEQ ID NO: 973 - DNA, 50 bp, Artificial Sequence
  Synthetic oligonucleotide
cggcattgtggatgaggatgtccaaccgtggctcagagctcagaaaggca

SEQ ID NO: 974 - DNA, 50 bp, Artificial Sequence
  Synthetic oligonucleotide
caggtttgtccccagttgatagttccgtgagttcctcaattattcctccg

SEQ ID NO: 975 - DNA, 50 bp, Artificial Sequence
  Synthetic oligonucleotide
gctagggtagaagcccatgaagggggtcccgcggcgctagcttttgtacg

SEQ ID NO: 976 - DNA, 50 bp, Artificial Sequence
  Synthetic oligonucleotide
tctggatgatgtctgtccacccaccgtctctgagtgttctcctcacctcg

SEQ ID NO: 977 - DNA, 50 bp, Artificial Sequence
  Synthetic oligonucleotide
attaatttagggctttttagtctcatctggagagtaagctccaagcctcg

SEQ ID NO: 978 - DNA, 50 bp, Artificial Sequence
  Synthetic oligonucleotide
cggcagcagcggtttcagcggtggcagcggctttggctccatctctggcg

SEQ ID NO: 979 - DNA, 50 bp, Artificial Sequence
  Synthetic oligonucleotide
caccttgaatgatagaacttgaacagctcattcatacagagtagaacacg

SEQ ID NO: 980 - DNA, 50 bp, Artificial Sequence
  Synthetic oligonucleotide
cggtgcccctgacctgcagtcgtcacctgcactccaggcgggcaacaaca

SEQ ID NO: 981 - DNA, 50 bp, Artificial Sequence
  Synthetic oligonucleotide
cgtccccgttgccatggcgagaggcgtcctctcctatggagagtgacagt

SEQ ID NO: 982 - DNA, 50 bp, Artificial Sequence
  Synthetic oligonucleotide
cttcttcccatagtttctttgcagctagcagctcctcatttctcttttcg

SEQ ID NO: 983 - DNA, 50 bp, Artificial Sequence
  Synthetic oligonucleotide
gggagtagctcctaagtagcctagacgctgattcaggcccggactgtgcg

SEQ ID NO: 984 - DNA, 50 bp, Artificial Sequence
  Synthetic oligonucleotide
atctctccggctcttacttgaaaaagcacttggaagaaactgtgtgtgcg

SEQ ID NO: 985 - DNA, 50 bp, Artificial Sequence
  Synthetic oligonucleotide
aacatccctacaataattctgtctcagtttgctgtggtaatttgatctcg

SEQ ID NO: 986 - DNA, 50 bp, Artificial Sequence
  Synthetic oligonucleotide
tggaagaactttggacaacatttccgcggagaccggcgcgaccacctgcg

SEQ ID NO: 987 - DNA, 50 bp, Artificial Sequence
  Synthetic oligonucleotide
ccccggggtttgcgaaggtccggggtaggagggctgcagcctgcgcgacg

SEQ ID NO: 988 - DNA, 50 bp, Artificial Sequence
  Synthetic oligonucleotide
cgaccctgggggttcctgccataaaacagtgagggattctggccaggctg

SEQ ID NO: 989 - DNA, 50 bp, Artificial Sequence
  Synthetic oligonucleotide
gggcgctttaaacaaatggctgcctcccagcgctctgagttaagggaccg

SEQ ID NO: 990 - DNA, 50 bp, Artificial Sequence
  Synthetic oligonucleotide
cgccctgaacttgcaggcaagaccagtggcaatgatggactcttcccgcc

SEQ ID NO: 991 - DNA, 50 bp, Artificial Sequence
  Synthetic oligonucleotide
cagttcttaaggtccagcaacacaaagcgaaaagttagtggaggactacg

SEQ ID NO: 992 - DNA, 50 bp, Artificial Sequence
  Synthetic oligonucleotide
cggagtttggagtttgaacccacccgcacccctttgagctaggaagtttg

SEQ ID NO: 993 - DNA, 50 bp, Artificial Sequence
  Synthetic oligonucleotide
tgctgcggcgatccgggtcgggctacgagggcagcaccagctggaaggcg

SEQ ID NO: 994 - DNA, 50 bp, Artificial Sequence
  Synthetic oligonucleotide
cgggcatgtccaggaaccagtctgcttccagtgccacctgtagttgcaac

SEQ ID NO: 995 - DNA, 50 bp, Artificial Sequence
  Synthetic oligonucleotide
cgctctctacttcagatcttgctcagttttgcttccggtgggctcctggg

SEQ ID NO: 996 - DNA, 50 bp, Artificial Sequence
  Synthetic oligonucleotide
cggttccatgccatgttttggaatttgtgtttacgtctgccttcatcccc

SEQ ID NO: 997 - DNA, 50 bp, Artificial Sequence
  Synthetic oligonucleotide
cggcgctcgtgtgaagaagttaattcaattcgctctgataaccgagttat

SEQ ID NO: 998 - DNA, 50 bp, Artificial Sequence
  Synthetic oligonucleotide
ttttaagcgaggctccggatggctgggatgtctttaggttagtagtcccg

SEQ ID NO: 999 - DNA, 50 bp, Artificial Sequence
  Synthetic oligonucleotide
cgaacctttcaaaacagaacaggcgtttggtgccaaacagggcagggtgt

SEQ ID NO: 1000 - DNA, 50 bp, Artificial Sequence
  Synthetic oligonucleotide
accaggcattgaggctctggtcctacacactgggcatagagatgaacacg

SEQ ID NO: 1001 - DNA, 50 bp, Artificial Sequence
  Synthetic oligonucleotide
gggatggagggacgattggggagcgcccgaggctgctgtgttggcgcccg

SEQ ID NO: 1002 - DNA, 50 bp, Artificial Sequence
  Synthetic oligonucleotide
caggcacagtgtgggaagagtgccattcaatcctccgcgtaaccctggcg

SEQ ID NO: 1003 - DNA, 50 bp, Artificial Sequence
  Synthetic oligonucleotide
cggcttgcagagtccagttaacaagagattgagctcaggagtccgagacc

SEQ ID NO: 1004 - DNA, 50 bp, Artificial Sequence
  Synthetic oligonucleotide
cgcgtctcgggagcaattcagtgtcgcctcacgtctggccttgcagaagt

SEQ ID NO: 1005 - DNA, 50 bp, Artificial Sequence
  Synthetic oligonucleotide
gatcctgctgaataaagggggttccgagctgggccgagatggggcatgcg

SEQ ID NO: 1006 - DNA, 50 bp, Artificial Sequence
  Synthetic oligonucleotide
cgaacttgggaagtgactgaaaaacttgcactgatgaattggaggggtaa

SEQ ID NO: 1007 - DNA, 50 bp, Artificial Sequence
  Synthetic oligonucleotide
ttatcatcattgtatcggctttacaacacttaaaaaccagacttgaggcg

SEQ ID NO: 1008 - DNA, 50 bp, Artificial Sequence
  Synthetic oligonucleotide
cgcccacacacgtgctggtgtcccgggaagagttcctggcaaagagctca

SEQ ID NO: 1009 - DNA, 50 bp, Artificial Sequence
  Synthetic oligonucleotide
cgcgtctgcgatgggagctcgataaggtcaccgtcaacagcatccacacg

SEQ ID NO: 1010 - DNA, 50 bp, Artificial Sequence
  Synthetic oligonucleotide
tgtgcaagccgaggtattggccgccataacgcacactgacttttgtaccg

SEQ ID NO: 1011 - DNA, 50 bp, Artificial Sequence
  Synthetic oligonucleotide
cgaggatatcgctaacatggagaggcaacaggctagaagagtccctgtct

SEQ ID NO: 1012 - DNA, 50 bp, Artificial Sequence
  Synthetic oligonucleotide
cggcgcagagccccgccaactcgcccgctcctccaaccttaagtcgtttc

SEQ ID NO: 1013 - DNA, 50 bp, Artificial Sequence
  Synthetic oligonucleotide
tatttaaccactgagtctaattcgaaaaatcgggactgggcccctaggcg

SEQ ID NO: 1014 - DNA, 50 bp, Artificial Sequence
  Synthetic oligonucleotide
cgccaaactttcaatagtttggagtgtagatgtgagacttcagctgccct

SEQ ID NO: 1015 - DNA, 50 bp, Artificial Sequence
  Synthetic oligonucleotide
cgccaatctcagcagtcctcacaggtggtctcgctccgcagggcccgcag

SEQ ID NO: 1016 - DNA, 50 bp, Artificial Sequence
  Synthetic oligonucleotide
cgccgtctagtggcggaattgtccagggaaggcaagttagttttatcctc

SEQ ID NO: 1017 - DNA, 50 bp, Artificial Sequence
  Synthetic oligonucleotide
tgcaggtttgctccaatcacagcagcaaggattgaagcaccaaccagccg

SEQ ID NO: 1018 - DNA, 50 bp, Artificial Sequence
  Synthetic oligonucleotide
cgccttacagcctccaaatacagaggcagcagccagaaccccaaagggcg

SEQ ID NO: 1019 - DNA, 50 bp, Artificial Sequence
  Synthetic oligonucleotide
acacagatgcgtgtaagaggcatcatgctctaaaacagtgcagaaatgcg

SEQ ID NO: 1020 - DNA, 50 bp, Artificial Sequence
  Synthetic oligonucleotide
cggagttgtcactgtgccacttcctggacgcggtgaggaggcttcagctc

SEQ ID NO: 1021 - DNA, 50 bp, Artificial Sequence
  Synthetic oligonucleotide
cgggatgctacggagggaggtgtatacaggtgttagacaaagccccctcc

SEQ ID NO: 1022 - DNA, 50 bp, Artificial Sequence
  Synthetic oligonucleotide
cggacaggtactatctgctggctgtggacaaacagtggcatctgagatgc

SEQ ID NO: 1023 - DNA, 50 bp, Artificial Sequence
  Synthetic oligonucleotide
cgcaaaacgaacccgatatttgcaaaacttaggaaaagacacaccggcgt

SEQ ID NO: 1024 - DNA, 50 bp, Artificial Sequence
  Synthetic oligonucleotide
cggtcagtgcctggctggggacccggaccggtgatttgttcaactctagg

SEQ ID NO: 1025 - DNA, 50 bp, Artificial Sequence
  Synthetic oligonucleotide
cgcacctttacaccacgccgcgctgccccagcctgcgtgctgcaaacgac

SEQ ID NO: 1026 - DNA, 50 bp, Artificial Sequence
  Synthetic oligonucleotide
acgtgctgctagagtggaacaagtatgtcagttcatccaaacataaaacg

SEQ ID NO: 1027 - DNA, 50 bp, Artificial Sequence
  Synthetic oligonucleotide
agactccctacaggtgggctacacttaggggttcaaatgctgcattaccg

SEQ ID NO: 1028 - DNA, 50 bp, Artificial Sequence
  Synthetic oligonucleotide
cggccgttgagctcattttcaaagaaaaaggaaggaggacactggaaaat

SEQ ID NO: 1029 - DNA, 50 bp, Artificial Sequence
  Synthetic oligonucleotide
tttgggagagcagctgcgaggggacagaatgcttcgctgtggtggttccg

SEQ ID NO: 1030 - DNA, 50 bp, Artificial Sequence
  Synthetic oligonucleotide
caaagcctgcgggcggggctccttgcaggtccccgaaagaatgagaaccg

SEQ ID NO: 1031 - DNA, 50 bp, Artificial Sequence
  Synthetic oligonucleotide
cgcacagcacctctccagctccatgcacgccaggggcctgggaccctggg

SEQ ID NO: 1032 - DNA, 50 bp, Artificial Sequence
  Synthetic oligonucleotide
cgggtttctccatatatggtgtgcagctcactttgtgttcttaaccctgt

SEQ ID NO: 1033 - DNA, 50 bp, Artificial Sequence
  Synthetic oligonucleotide
cgcttgaaaaaagttttcgcagactgtgctggagctggtgctgaaaaagg

SEQ ID NO: 1034 - DNA, 50 bp, Artificial Sequence
  Synthetic oligonucleotide
cgtcttaaaactttgcactttaagctgggcatagtgatgcatgcctgtag

SEQ ID NO: 1035 - DNA, 50 bp, Artificial Sequence
  Synthetic oligonucleotide
gtatgtgcgtggagagtggggcggcaggcaacccgagttcttgagctccg

SEQ ID NO: 1036 - DNA, 50 bp, Artificial Sequence
  Synthetic oligonucleotide
cgctgactcctcttactggttcttgggtagcagcccccaacttggtctga

SEQ ID NO: 1037 - DNA, 50 bp, Artificial Sequence
  Synthetic oligonucleotide
tttcctgtcaccagtccccgatcaagcatggtgtcaagaagatgcctacg

SEQ ID NO: 1038 - DNA, 50 bp, Artificial Sequence
  Synthetic oligonucleotide
gcattttagccagcaagacccgcttgcattgcagtcgttcacggtgctcg

SEQ ID NO: 1039 - DNA, 50 bp, Artificial Sequence
  Synthetic oligonucleotide
ggtgctcctgctgaacagccagagctggggagtagaccccgcttcacacg

SEQ ID NO: 1040 - DNA, 50 bp, Artificial Sequence
  Synthetic oligonucleotide
cgccagccctctctgggctcgcctcccggctaccccggagtcagactgcc

SEQ ID NO: 1041 - DNA, 50 bp, Artificial Sequence
  Synthetic oligonucleotide
cggcccgctaaaagcatggactgttttggcagtcactgtcagacctcccg

SEQ ID NO: 1042 - DNA, 50 bp, Artificial Sequence
  Synthetic oligonucleotide
cggcggttcttagctttttagtctctgtcacgctaatacatgctgttagt

SEQ ID NO: 1043 - DNA, 50 bp, Artificial Sequence
  Synthetic oligonucleotide
cgactgaaaagccataacattgtttcatgactaggatgtaggctaaaggc

SEQ ID NO: 1044 - DNA, 50 bp, Artificial Sequence
  Synthetic oligonucleotide
cggagaaaaaacaaagcaaaatttgttccccacacggtttttggctttag

SEQ ID NO: 1045 - DNA, 50 bp, Artificial Sequence
  Synthetic oligonucleotide
aagaatcaacatggcgagaaactctgtgggtgacgtccgtttacaaaccg

SEQ ID NO: 1046 - DNA, 50 bp, Artificial Sequence
  Synthetic oligonucleotide
ccgagcatcgggtgcgtcgtgctcttttctaggagcgtggggtgccttcg

SEQ ID NO: 1047 - DNA, 50 bp, Artificial Sequence
  Synthetic oligonucleotide
gcaagatggcgggaacggctacggtcaaagtgtcgcgataggagctttcg

SEQ ID NO: 1048 - DNA, 50 bp, Artificial Sequence
  Synthetic oligonucleotide
cttcgatgacattcaactgacttactcttccgaaggaacggctaaaaccg

SEQ ID NO: 1049 - DNA, 50 bp, Artificial Sequence
  Synthetic oligonucleotide
gaggccgagtccaggagtggaagccgcgcgagtggcgaagggagcagtcg

SEQ ID NO: 1050 - DNA, 50 bp, Artificial Sequence
  Synthetic oligonucleotide
cggcgaccactccgcctctgccgtcccacctgaccgcagaggagaccccc

SEQ ID NO: 1051 - DNA, 50 bp, Artificial Sequence
  Synthetic oligonucleotide
tcaactcagggcgcagaacacttggggtctgagtgtgcaaggaccatgcg

SEQ ID NO: 1052 - DNA, 50 bp, Artificial Sequence
  Synthetic oligonucleotide
cacacaaagacatgcgaagaggggctgaacgaggctcgcgcacaaagacg

SEQ ID NO: 1053 - DNA, 50 bp, Artificial Sequence
  Synthetic oligonucleotide
cgggacactgatctgggacgctgggactcagcatacacacacctggcggt

SEQ ID NO: 1054 - DNA, 50 bp, Artificial Sequence
  Synthetic oligonucleotide
cgggttacaactaaactggagaacatggccaaggatgggaactcagcctg

SEQ ID NO: 1055 - DNA, 50 bp, Artificial Sequence
  Synthetic oligonucleotide
cgagtgaggggcgcagaggcggcagagagcggagagccccggtgtctccg

SEQ ID NO: 1056 - DNA, 50 bp, Artificial Sequence
  Synthetic oligonucleotide
agcctgggtggtgaaggcctccctgcagaagcgtcccgacggccacatcg

SEQ ID NO: 1057 - DNA, 50 bp, Artificial Sequence
  Synthetic oligonucleotide
gtaataattattcctgacagtgaccagtcactgaacattccaggcttacg

SEQ ID NO: 1058 - DNA, 50 bp, Artificial Sequence
  Synthetic oligonucleotide
cggtccccgtttcctcaacagaggttaaaaagctcgtgctctggccgggc

SEQ ID NO: 1059 - DNA, 50 bp, Artificial Sequence
  Synthetic oligonucleotide
cgaccccccagtggggtttctttccgagggtcccgcccctcgcagctgct

SEQ ID NO: 1060 - DNA, 50 bp, Artificial Sequence
  Synthetic oligonucleotide
cgctgagcttttttggtcaactctgggatgtgtgcaccatctaatcggtc

SEQ ID NO: 1061 - DNA, 50 bp, Artificial Sequence
  Synthetic oligonucleotide
cgtccagggccagccagcagccccgggctgcgcccccgcgcccaccccca

SEQ ID NO: 1062 - DNA, 50 bp, Artificial Sequence
  Synthetic oligonucleotide
gagtcccttccagcactctcccctttgttcctttttctgggcaagaaccg

SEQ ID NO: 1063 - DNA, 50 bp, Artificial Sequence
  Synthetic oligonucleotide
tgttttcctattagttgcttcgcggtcgagttctaggcgcataatcatcg

SEQ ID NO: 1064 - DNA, 50 bp, Artificial Sequence
  Synthetic oligonucleotide
cgctcccaccgcggcactccgcctctgggcctttgaggcgcctggggcct

SEQ ID NO: 1065 - DNA, 50 bp, Artificial Sequence
  Synthetic oligonucleotide
ggacgtcggcgccagggcttggggtgggaacaggtgcggggctgcgtccg

SEQ ID NO: 1066 - DNA, 50 bp, Artificial Sequence
  Synthetic oligonucleotide
gaggggcaccactccgggagaggcggcgctgggcgtcttgggggtgcgcg

SEQ ID NO: 1067 - DNA, 50 bp, Artificial Sequence
  Synthetic oligonucleotide
ccagcggtacttgctccgttaggggcggtcaattaagtggcttcttgtcg

SEQ ID NO: 1068 - DNA, 50 bp, Artificial Sequence
  Synthetic oligonucleotide
ttcctctgcctgaggtgctgaccttgcctctttccctgacagtaagaacg

SEQ ID NO: 1069 - DNA, 50 bp, Artificial Sequence
  Synthetic oligonucleotide
ctgccctctcatagcagggagtaattgccttcaggtaaaagttgattccg

SEQ ID NO: 1070 - DNA, 50 bp, Artificial Sequence
  Synthetic oligonucleotide
cgcagcctgggatatcacactgggccatctcagagaggagaggcctctgt

SEQ ID NO: 1071 - DNA, 50 bp, Artificial Sequence
  Synthetic oligonucleotide
cggctcactggccgcgtcgccaccgcgtccctgagtgctcagaacttacc

SEQ ID NO: 1072 - DNA, 50 bp, Artificial Sequence
  Synthetic oligonucleotide
cgcccgggcagcctgggaggggccctttgaccttgaccccgctccttgaa

SEQ ID NO: 1073 - DNA, 50 bp, Artificial Sequence
  Synthetic oligonucleotide
tccaaatggaccaatcaccgaggagctgagatcgtggcggacacgttccg

SEQ ID NO: 1074 - DNA, 50 bp, Artificial Sequence
  Synthetic oligonucleotide
cgcctccgccccgcacctcctgacccccgcccacacacggcgtggagcgg

SEQ ID NO: 1075 - DNA, 50 bp, Artificial Sequence
  Synthetic oligonucleotide
tgcaggagttcctctgagctccgtggggaacagtgctggccccgagtgcg

SEQ ID NO: 1076 - DNA, 50 bp, Artificial Sequence
  Synthetic oligonucleotide
agtctcaggcgggcattctgagctgcttcttgtcactggggaaaaccacg

SEQ ID NO: 1077 - DNA, 50 bp, Artificial Sequence
  Synthetic oligonucleotide
tgaaacttggaatatgattccatgattctccggagtcgggttttcaaacg

SEQ ID NO: 1078 - DNA, 50 bp, Artificial Sequence
  Synthetic oligonucleotide
cgcccgccgctaggtccatcccggcccagccaccatgtccatccacttca

SEQ ID NO: 1079 - DNA, 50 bp, Artificial Sequence
  Synthetic oligonucleotide
cgccagtagtgttgtggattggggaggaaagtgaacagtagagaaacaaa

SEQ ID NO: 1080 - DNA, 50 bp, Artificial Sequence
  Synthetic oligonucleotide
ttttcatggaccccagataaagactttgacagccagatatccaagatccg

SEQ ID NO: 1081 - DNA, 50 bp, Artificial Sequence
  Synthetic oligonucleotide
tctcccagaacaacagttgtgatatgatctgttttggggcccttcctgcg

SEQ ID NO: 1082 - DNA, 50 bp, Artificial Sequence
  Synthetic oligonucleotide
cgccctctatgtgggcggaaatcatccggcgaagatgaagacgacccctt

SEQ ID NO: 1083 - DNA, 50 bp, Artificial Sequence
  Synthetic oligonucleotide
caagaggaagcggccccgtgtggctgggggcggcggcgcaggtggtagcg

SEQ ID NO: 1084 - DNA, 50 bp, Artificial Sequence
  Synthetic oligonucleotide
cggacgcatgaccttctggaagatgccaccgtgcggggtgccagtccctc

SEQ ID NO: 1085 - DNA, 50 bp, Artificial Sequence
  Synthetic oligonucleotide
cggccactactgctgtgccatcatgtgggggtagcccatggcctacaccc

SEQ ID NO: 1086 - DNA, 50 bp, Artificial Sequence
  Synthetic oligonucleotide
cgaggccataggaagtgagagcgccatcatactaatgttaaatagactga

SEQ ID NO: 1087 - DNA, 50 bp, Artificial Sequence
  Synthetic oligonucleotide
ctgcagtccctaagggtggagagtgcggtggggatgtgcctccaactgcg

SEQ ID NO: 1088 - DNA, 50 bp, Artificial Sequence
  Synthetic oligonucleotide
gggcaggcagaggcctagggggtgggctctgagggcagccactcccaccg

SEQ ID NO: 1089 - DNA, 50 bp, Artificial Sequence
  Synthetic oligonucleotide
gaagctggggacaatggttatggacccgggcggggccttgtccttggccg

SEQ ID NO: 1090 - DNA, 50 bp, Artificial Sequence
  Synthetic oligonucleotide
cggggctgggcggccctgggtgacagacacaagcttctgaacccaagcta

SEQ ID NO: 1091 - DNA, 50 bp, Artificial Sequence
  Synthetic oligonucleotide
cacatttaggctggaatgggtgacagcatgcgagctcgggggtgggctcg

SEQ ID NO: 1092 - DNA, 50 bp, Artificial Sequence
  Synthetic oligonucleotide
cctgcaacttcaagtccccaggtggctctgccagagcgttcacgatgacg

SEQ ID NO: 1093 - DNA, 50 bp, Artificial Sequence
  Synthetic oligonucleotide
cggctgccttgctgcagcgaatccgcacaattaaaagctttaattagtgg

SEQ ID NO: 1094 - DNA, 50 bp, Artificial Sequence
  Synthetic oligonucleotide
caggttaccggccagagtggtggctcttggtgcagggcatgctgctctcg

SEQ ID NO: 1095 - DNA, 50 bp, Artificial Sequence
  Synthetic oligonucleotide
cgggtttgaatgaacccttgaggtgaagcttaaagacagagaggatgccc

SEQ ID NO: 1096 - DNA, 50 bp, Artificial Sequence
  Synthetic oligonucleotide
cgctccggctcccgacctccccgctgccgaagcaactgggtcagcctttc

SEQ ID NO: 1097 - DNA, 50 bp, Artificial Sequence
  Synthetic oligonucleotide
cgggctgcacaatgccacggctgctccgccagctcgcccctgccccgtcc

SEQ ID NO: 1098 - DNA, 50 bp, Artificial Sequence
  Synthetic oligonucleotide
cggcccccaggcctctcaccgtgcacgtctctgttccgctgccacaacag

SEQ ID NO: 1099 - DNA, 50 bp, Artificial Sequence
  Synthetic oligonucleotide
cggtggaggcttctgttctcaatgaaattcacttgcggctttttaactgc

SEQ ID NO: 1100 - DNA, 50 bp, Artificial Sequence
  Synthetic oligonucleotide
ggacgtcggaaacatgcccatggggtgggcagagctgctctgaggtgccg

SEQ ID NO: 1101 - DNA, 50 bp, Artificial Sequence
  Synthetic oligonucleotide
gcatgcccacggcgacagcggccacgttaagtgagggtcgtcttgttccg

SEQ ID NO: 1102 - DNA, 50 bp, Artificial Sequence
  Synthetic oligonucleotide
cggcccgcgacggagttcccaggaagaaggctggctgcaaaaacattccc

SEQ ID NO: 1103 - DNA, 50 bp, Artificial Sequence
  Synthetic oligonucleotide
cgggcgccttgtaagcgtcacatttagttttgctgtgaagcgagtcaggt

SEQ ID NO: 1104 - DNA, 50 bp, Artificial Sequence
  Synthetic oligonucleotide
cgccatgggctactcagtttacagccactgcagtatcacagccaggtcag

SEQ ID NO: 1105 - DNA, 50 bp, Artificial Sequence
  Synthetic oligonucleotide
gtaagacctaaagttcttaggagattgtccaaaacaaagaaacatgtccg

SEQ ID NO: 1106 - DNA, 50 bp, Artificial Sequence
  Synthetic oligonucleotide
cgcccgaggtcccgctccactgcccgcgccccccgcgcagccttatatct

SEQ ID NO: 1107 - DNA, 50 bp, Artificial Sequence
  Synthetic oligonucleotide
tggctaactgaaccttatcgataggatgagtcgctgcggcagtctgctcg

SEQ ID NO: 1108 - DNA, 50 bp, Artificial Sequence
  Synthetic oligonucleotide
cgccccgaggcgggggcgcactcaccaccagccaatgggcgcatcttcca

SEQ ID NO: 1109 - DNA, 50 bp, Artificial Sequence
  Synthetic oligonucleotide
tgcgggacccgccagagtgtgcttggcttccgcgtgtccgtgtgtctgcg

SEQ ID NO: 1110 - DNA, 50 bp, Artificial Sequence
  Synthetic oligonucleotide
cgcccggcctccctgcctctgcgccttcacctgaccgcaaaggcggccag

SEQ ID NO: 1111 - DNA, 50 bp, Artificial Sequence
  Synthetic oligonucleotide
gaggtggggacgatggccggagtgacgcccgcgggagccctgctggaccg

SEQ ID NO: 1112 - DNA, 50 bp, Artificial Sequence
  Synthetic oligonucleotide
tccagaaagggttaaacccgggcaagcaccagctccacgcagttaatccg

SEQ ID NO: 1113 - DNA, 50 bp, Artificial Sequence
  Synthetic oligonucleotide
ccctccccagggatgtagctctcaagcaaacctaggctgggacggatgcg

SEQ ID NO: 1114 - DNA, 50 bp, Artificial Sequence
  Synthetic oligonucleotide
cggggatctattgtgtcccattgaggacttaaatgagctgaataattggc

SEQ ID NO: 1115 - DNA, 50 bp, Artificial Sequence
  Synthetic oligonucleotide
cctacaccgccgaggaccgactattgtgaagccactttgggagcgggtcg

SEQ ID NO: 1116 - DNA, 50 bp, Artificial Sequence
  Synthetic oligonucleotide
ggggtgaggagctgcggtctgtgagtcctctcccgccaatgggtggaccg

SEQ ID NO: 1117 - DNA, 50 bp, Artificial Sequence
  Synthetic oligonucleotide
taccagctgagcctgattacacagtctgtgtgcctgtcccaggacagacg

SEQ ID NO: 1118 - DNA, 50 bp, Artificial Sequence
  Synthetic oligonucleotide
cgccccgctgcgcccacctccccggctgctcccggagggctcacaaaggc

SEQ ID NO: 1119 - DNA, 50 bp, Artificial Sequence
  Synthetic oligonucleotide
gcaggttgaaacaatcgagtgggcgcgccaggactccccagctcctggcg

SEQ ID NO: 1120 - DNA, 50 bp, Artificial Sequence
  Synthetic oligonucleotide
cggacatcgagtctgaccttgaccgagaccccaatagtgcaacagactcg

SEQ ID NO: 1121 - DNA, 50 bp, Artificial Sequence
  Synthetic oligonucleotide
gcttgtctgagcgagacctagaccgtgacggtgcacgcctacgagaatcg

SEQ ID NO: 1122 - DNA, 50 bp, Artificial Sequence
  Synthetic oligonucleotide
cggtttaattaagccacagccctagcacgaggaccccggcgacccatccg

SEQ ID NO: 1123 - DNA, 50 bp, Artificial Sequence
  Synthetic oligonucleotide
cgggagggggcttctggtcccaggcccaagaccgaccgctttgcaactga

SEQ ID NO: 1124 - DNA, 50 bp, Artificial Sequence
  Synthetic oligonucleotide
cgccccctcggacctggcgccgctgcgcctgctggagcctcgcttcccca

SEQ ID NO: 1125 - DNA, 50 bp, Artificial Sequence
  Synthetic oligonucleotide
cgctgcagattaattttgtcataaaattgactggtgtgctaagggacgtt

SEQ ID NO: 1126 - DNA, 50 bp, Artificial Sequence
  Synthetic oligonucleotide
cggctggtccgggcccaggccctcctccagcgacacccaggcctcgatgt

SEQ ID NO: 1127 - DNA, 50 bp, Artificial Sequence
  Synthetic oligonucleotide
gcctctctttaaatatcaagctcacaaatatgtttaatgaacttgatacg

SEQ ID NO: 1128 - DNA, 50 bp, Artificial Sequence
  Synthetic oligonucleotide
cgcattcttttggtttgaggaatgtagtattgtcaggttgttgcctgcac

SEQ ID NO: 1129 - DNA, 50 bp, Artificial Sequence
  Synthetic oligonucleotide
cgccgtcctccaccagcacgtcggccacctccgagaagtcatcgttgacc

SEQ ID NO: 1130 - DNA, 50 bp, Artificial Sequence
  Synthetic oligonucleotide
cggccaacacaggaggcactgaccacggggcaggcgctatttaaaaatcg

SEQ ID NO: 1131 - DNA, 50 bp, Artificial Sequence
  Synthetic oligonucleotide
tggcctactcacctgggggcgaactccttctggcacatggggcagctgcg

SEQ ID NO: 1132 - DNA, 50 bp, Artificial Sequence
  Synthetic oligonucleotide
cgcaacactcccgcagaaacacacagcccggcagcttctgaggcagcgcg

SEQ ID NO: 1133 - DNA, 50 bp, Artificial Sequence
  Synthetic oligonucleotide
atttgaaatacagacaggatcccaacctgcacttgcatgaccttgtctcg

SEQ ID NO: 1134 - DNA, 50 bp, Artificial Sequence
  Synthetic oligonucleotide
aagggagcccaacagtcttcataagccagacctagtctctaaggtcaccg

SEQ ID NO: 1135 - DNA, 50 bp, Artificial Sequence
  Synthetic oligonucleotide
gggagagcatttgcccttctgtttttctccctttgttactgattggttcg

SEQ ID NO: 1136 - DNA, 50 bp, Artificial Sequence
  Synthetic oligonucleotide
cgcccagacacctctcgaggaagggagattggactttcccagattggagg

SEQ ID NO: 1137 - DNA, 50 bp, Artificial Sequence
  Synthetic oligonucleotide
gccaccaaatggcggctccggcagcctgctgcactgataaagaggactcg

SEQ ID NO: 1138 - DNA, 50 bp, Artificial Sequence
  Synthetic oligonucleotide
cggcctcaccccaacgcagtccctttggacgccaccagttcctgggcgtg

SEQ ID NO: 1139 - DNA, 50 bp, Artificial Sequence
  Synthetic oligonucleotide
cggaatttttgtgcccgagcgctcgggatccacggcaaaaccaggcacat

SEQ ID NO: 1140 - DNA, 50 bp, Artificial Sequence
  Synthetic oligonucleotide
cgaagacaggtcttgaatatagaccctgactttttcactgtttggtttct

SEQ ID NO: 1141 - DNA, 50 bp, Artificial Sequence
  Synthetic oligonucleotide
acagatgtgcttgcatccgggccgtgcgtgcctgcttcacgggttttccg

SEQ ID NO: 1142 - DNA, 50 bp, Artificial Sequence
  Synthetic oligonucleotide
cgccctcgcactcacccttggtggcccctgcctcctgcgggctcaggagg

SEQ ID NO: 1143 - DNA, 50 bp, Artificial Sequence
  Synthetic oligonucleotide
tggctctcgggtgtcaaaggctctcccaaatctacatggggtgttcctcg

SEQ ID NO: 1144 - DNA, 50 bp, Artificial Sequence
  Synthetic oligonucleotide
gtgtctcgtccgaggccctggctgttcctgaaacggcctggccaggaccg

SEQ ID NO: 1145 - DNA, 50 bp, Artificial Sequence
  Synthetic oligonucleotide
cggctgcgcagaccttgcccagcacaccagattgccagctccgagacccg

SEQ ID NO: 1146 - DNA, 50 bp, Artificial Sequence
  Synthetic oligonucleotide
ctccttcccactgtgtaccatgtacagcattgctattacagggaacttcg

SEQ ID NO: 1147 - DNA, 50 bp, Artificial Sequence
  Synthetic oligonucleotide
taattacctcctctgcaaagagctttccctagtatattttattgattgcg

SEQ ID NO: 1148 - DNA, 50 bp, Artificial Sequence
  Synthetic oligonucleotide
cgccccgcctcattctcgggaagtttcaggaacttccaggggagttgcaa

SEQ ID NO: 1149 - DNA, 50 bp, Artificial Sequence
  Synthetic oligonucleotide
gctggtgggttctcagtcaagcagggctgacagccgtccctctttggacg

SEQ ID NO: 1150 - DNA, 50 bp, Artificial Sequence
  Synthetic oligonucleotide
ggcgttttggaggtggttgccatggggacctggatgctgacgaaggctcg

SEQ ID NO: 1151 - DNA, 50 bp, Artificial Sequence
  Synthetic oligonucleotide
cgaaaccctgggagacgaatcatactgcaaatcatatccctgggtagcag

SEQ ID NO: 1152 - DNA, 50 bp, Artificial Sequence
  Synthetic oligonucleotide
cgattcaattaggccgccccgctcggaagcttgtctcctctgatatccag

SEQ ID NO: 1153 - DNA, 50 bp, Artificial Sequence
  Synthetic oligonucleotide
cggcttccgcccacccatggactacgcctttagcgatctcatgcgtgacc

SEQ ID NO: 1154 - DNA, 50 bp, Artificial Sequence
  Synthetic oligonucleotide
cgcgccacgccagatcgagatactctcatagtgattgtgaatcaatcgcc

SEQ ID NO: 1155 - DNA, 50 bp, Artificial Sequence
  Synthetic oligonucleotide
atcttatccttctcttgttttacaaatcgacgaatcagcggtctagaacg

SEQ ID NO: 1156 - DNA, 50 bp, Artificial Sequence
  Synthetic oligonucleotide
cgcccgcagccacagcctcggtcaccgcatccatcagggccccgcgccgc

SEQ ID NO: 1157 - DNA, 50 bp, Artificial Sequence
  Synthetic oligonucleotide
cggcttcacctctggcactctctgaaacgtcgttgtctatggtttcccta

SEQ ID NO: 1158 - DNA, 50 bp, Artificial Sequence
  Synthetic oligonucleotide
cggtaaaaggccctggtagaacactacatgacccctctgataaatcatgc

SEQ ID NO: 1159 - DNA, 50 bp, Artificial Sequence
  Synthetic oligonucleotide
cgtagacgaacaaggaaaagtttactatgtgagtaataaggcatttgtaa

SEQ ID NO: 1160 - DNA, 50 bp, Artificial Sequence
  Synthetic oligonucleotide
ggggctgggtttctaaggcaggtttctaaggtgtcttcctacagacaccg

SEQ ID NO: 1161 - DNA, 50 bp, Artificial Sequence
  Synthetic oligonucleotide
ccttcccgctagggcttctgggaagatctacaatattcatgagggaggcg

SEQ ID NO: 1162 - DNA, 50 bp, Artificial Sequence
  Synthetic oligonucleotide
atgcttgctcaggtttatgcccacataaaacttctgagctgttgttttcg

SEQ ID NO: 1163 - DNA, 50 bp, Artificial Sequence
  Synthetic oligonucleotide
gagggcagccggcaggggctggtaccaacttggcggttctcggaggggcg

SEQ ID NO: 1164 - DNA, 50 bp, Artificial Sequence
  Synthetic oligonucleotide
cgggtaactagagagctctatcgaagatgatcatttgctggtcctgcagt

SEQ ID NO: 1165 - DNA, 50 bp, Artificial Sequence
  Synthetic oligonucleotide
ttcccgctgcactccggcttcatccatttctggtcagtttcgtgggtgcg

SEQ ID NO: 1166 - DNA, 50 bp, Artificial Sequence
  Synthetic oligonucleotide
cgccctccgctcccgccatggggccaacgtggggctcctaagagttgccg

SEQ ID NO: 1167 - DNA, 50 bp, Artificial Sequence
  Synthetic oligonucleotide
cggcaggatagtttatgcctgggctcctgcgttggcatatgcgccttgag

SEQ ID NO: 1168 - DNA, 50 bp, Artificial Sequence
  Synthetic oligonucleotide
cctttcctggtgccccagtcttctgcactaagctgtggtgagcacatccg

SEQ ID NO: 1169 - DNA, 50 bp, Artificial Sequence
  Synthetic oligonucleotide
cgagcccaccaaccatgccatcattcagacgctgctcaactccatggcac

SEQ ID NO: 1170 - DNA, 50 bp, Artificial Sequence
  Synthetic oligonucleotide
gaggtgctggggagcagaagctgggatctttccgatttcagactccagcg

SEQ ID NO: 1171 - DNA, 50 bp, Artificial Sequence
  Synthetic oligonucleotide
gcctgtctccctttaccctgacggtattttcagaggcactaggagaagcg

SEQ ID NO: 1172 - DNA, 50 bp, Artificial Sequence
  Synthetic oligonucleotide
ttgcaaaaggatagaaccgtctcgaccagggcactaggactggaagatcg

SEQ ID NO: 1173 - DNA, 50 bp, Artificial Sequence
  Synthetic oligonucleotide
cacggcaggaaggtggcggtaaagtcaggggcgagctcctggtcagggcg

SEQ ID NO: 1174 - DNA, 50 bp, Artificial Sequence
  Synthetic oligonucleotide
aatagggggtgaggacattcagatgcccagggaccactcggcccgtcacg

SEQ ID NO: 1175 - DNA, 50 bp, Artificial Sequence
  Synthetic oligonucleotide
tactcttaaagtgctaaaacagtgtccactgcagagtaaacttccttccg

SEQ ID NO: 1176 - DNA, 50 bp, Artificial Sequence
  Synthetic oligonucleotide
cgcgcccagctccctgtgaatacccactgattgcccccggagtctccccg

SEQ ID NO: 1177 - DNA, 50 bp, Artificial Sequence
  Synthetic oligonucleotide
tgagatgtccccagcagggggctttgggcgattaacttttcggaaagtcg

SEQ ID NO: 1178 - DNA, 50 bp, Artificial Sequence
  Synthetic oligonucleotide
gatggagtcacccccaccctgggaaatcgggcacctgacatggacagtcg

SEQ ID NO: 1179 - DNA, 50 bp, Artificial Sequence
  Synthetic oligonucleotide
cgcagagaggcgcaccggacacggtaattaggagcaattcacacgctctc

SEQ ID NO: 1180 - DNA, 50 bp, Artificial Sequence
  Synthetic oligonucleotide
cggctggtaccctgagcaatatgaacccccaaatccaccagagattccct

SEQ ID NO: 1181 - DNA, 50 bp, Artificial Sequence
  Synthetic oligonucleotide
ggccggacttgaccatttttaaaatgttatgaatgacacatttagagacg

SEQ ID NO: 1182 - DNA, 50 bp, Artificial Sequence
  Synthetic oligonucleotide
ttgctctggagcttcccagttcccaggactctggggctcttccctggacg

SEQ ID NO: 1183 - DNA, 50 bp, Artificial Sequence
  Synthetic oligonucleotide
gacgcagcgcctttgtgtggcggcgggtgtcgggggcgggaagaatcgcg

SEQ ID NO: 1184 - DNA, 50 bp, Artificial Sequence
  Synthetic oligonucleotide
cggccccgttgatgcaactgcatgccatggttgccagagaatcctaggta

SEQ ID NO: 1185 - DNA, 50 bp, Artificial Sequence
  Synthetic oligonucleotide
cgccctccgagtgtatgtctatcccagaagaaaacctgtcttaaagttcg

SEQ ID NO: 1186 - DNA, 50 bp, Artificial Sequence
  Synthetic oligonucleotide
cgcggccgaccccctgtccccacccgagcaggatttcctgatgtaaacac

SEQ ID NO: 1187 - DNA, 50 bp, Artificial Sequence
  Synthetic oligonucleotide
cgcatgtgcagtgaaatggcctagcccgggaattcgatcggcaaagcacg

SEQ ID NO: 1188 - DNA, 50 bp, Artificial Sequence
  Synthetic oligonucleotide
cggcgatggccaaataataaactaacagtaatattatagtaacagcatcc

SEQ ID NO: 1189 - DNA, 50 bp, Artificial Sequence
  Synthetic oligonucleotide
ggacgcctgggttgaggctcgccggggcgtgagcggggctgctgcagacg

SEQ ID NO: 1190 - DNA, 50 bp, Artificial Sequence
  Synthetic oligonucleotide
agcacacaccttcgtccgcatttcagggacaaaagtcgtccaaggaatcg

SEQ ID NO: 1191 - DNA, 50 bp, Artificial Sequence
  Synthetic oligonucleotide
cgtggcgggcagggacatcacggagctcctcatgcagctgctcctggcca

SEQ ID NO: 1192 - DNA, 50 bp, Artificial Sequence
  Synthetic oligonucleotide
gcccatttgtgcggcgctgcctggtgactcagcgtaggctgatgttcacg

SEQ ID NO: 1193 - DNA, 50 bp, Artificial Sequence
  Synthetic oligonucleotide
cctagaagctcccacccttctgactgttgccacgtagttcttagtttccg

SEQ ID NO: 1194 - DNA, 50 bp, Artificial Sequence
  Synthetic oligonucleotide
gtgctgatcccagtgacagagcagcatgagtcactgcccgccagggctcg

SEQ ID NO: 1195 - DNA, 50 bp, Artificial Sequence
  Synthetic oligonucleotide
cggcgccagccatggagcccgaagccccccgtcgccgccacacccatcag

SEQ ID NO: 1196 - DNA, 50 bp, Artificial Sequence
  Synthetic oligonucleotide
cgggcagccctgaagaggaacggtccctagagtccgtcccgcagctgctt

SEQ ID NO: 1197 - DNA, 50 bp, Artificial Sequence
  Synthetic oligonucleotide
tgtgcatgcacgtgggagcccagccctgtaagcaccattcgttatttacg

SEQ ID NO: 1198 - DNA, 50 bp, Artificial Sequence
  Synthetic oligonucleotide
cgctgtttcagacaacaacaaagccacagggaggagtttagctgcagtga

SEQ ID NO: 1199 - DNA, 50 bp, Artificial Sequence
  Synthetic oligonucleotide
tatttgtgacgtaggacacatggtctacttcttctcaatatcacatctcg

SEQ ID NO: 1200 - DNA, 50 bp, Artificial Sequence
  Synthetic oligonucleotide
cgaggaccctgcagaactcgagcctttaagcgctcctctaggctcacatg

SEQ ID NO: 1201 - DNA, 50 bp, Artificial Sequence
  Synthetic oligonucleotide
aacagggaggcgaagacaactttgttttttcccgggagagccctcgctcg

SEQ ID NO: 1202 - DNA, 50 bp, Artificial Sequence
  Synthetic oligonucleotide
atgaattaggctggaaactgcccccatacctctaagctatgggaagaccg

SEQ ID NO: 1203 - DNA, 50 bp, Artificial Sequence
  Synthetic oligonucleotide
agtgggttaaaaccacaacccttggggagccccagaagtggctcatctcg

SEQ ID NO: 1204 - DNA, 50 bp, Artificial Sequence
  Synthetic oligonucleotide
atatgcaggtctcactttaaaaggtcttgaaatggagttcctaccagacg

SEQ ID NO: 1205 - DNA, 50 bp, Artificial Sequence
  Synthetic oligonucleotide
cgagaaaaggaaattttaaaaggcacaggaaatggtcctacagtaatctg

SEQ ID NO: 1206 - DNA, 50 bp, Artificial Sequence
  Synthetic oligonucleotide
cgaggccccaagatccatgtcgcccggaatcccggtgcctaggccttgtc

SEQ ID NO: 1207 - DNA, 50 bp, Artificial Sequence
  Synthetic oligonucleotide
cacaatcctgggtcgtcgggggactgtaccgagcgcccttggagtgctcg

SEQ ID NO: 1208 - DNA, 50 bp, Artificial Sequence
  Synthetic oligonucleotide
tgtcaaagggcagcagggcccggccgttgtcttggaagcgctggttgacg

SEQ ID NO: 1209 - DNA, 50 bp, Artificial Sequence
  Synthetic oligonucleotide
cggatatggttggtgattaaaaatcattattttctttagtctgggagaag

SEQ ID NO: 1210 - DNA, 50 bp, Artificial Sequence
  Synthetic oligonucleotide
gaacaactaggcgggatgtacttttgagccctgccgggtgtctccgatcg

SEQ ID NO: 1211 - DNA, 50 bp, Artificial Sequence
  Synthetic oligonucleotide
cgcgcacccaattcagtcgcccgctcccgttcggctcctcgaagccatgg

SEQ ID NO: 1212 - DNA, 50 bp, Artificial Sequence
  Synthetic oligonucleotide
aagggtagagtggacttcccagagctttagtacctgagactggggactcg

SEQ ID NO: 1213 - DNA, 50 bp, Artificial Sequence
  Synthetic oligonucleotide
cggagggctcccgatgaaccgagtcacgttttgtaaccacattaacggac

SEQ ID NO: 1214 - DNA, 50 bp, Artificial Sequence
  Synthetic oligonucleotide
cgcccccaactcaaggcaggctacacaagatctgtctccgttggcgtccc

SEQ ID NO: 1215 - DNA, 50 bp, Artificial Sequence
  Synthetic oligonucleotide
aggaacatctacccggctaagagacgccgccagagtccctaaagctggcg

SEQ ID NO: 1216 - DNA, 50 bp, Artificial Sequence
  Synthetic oligonucleotide
gtcgtttccaatgacggacattaaccagactgtcagatcctggggagtcg

SEQ ID NO: 1217 - DNA, 50 bp, Artificial Sequence
  Synthetic oligonucleotide
cggggtagcataagaacctgctctaattccaagggaattcaaggagttaa

SEQ ID NO: 1218 - DNA, 50 bp, Artificial Sequence
  Synthetic oligonucleotide
ccaagctgataacaggattagtcgcaccgataaggaatgctctgacaacg

SEQ ID NO: 1219 - DNA, 50 bp, Artificial Sequence
  Synthetic oligonucleotide
agaggttggtccttcttcctccctttcttcttcccttcctttgggcgccg

SEQ ID NO: 1220 - DNA, 50 bp, Artificial Sequence
  Synthetic oligonucleotide
acaagggacatctttttcacagacttgccttacacagtttcttgaagacg

SEQ ID NO: 1221 - DNA, 50 bp, Artificial Sequence
  Synthetic oligonucleotide
cggaaatgaggacaggtgaaaggaagagacccaatcttaattagaacggt

SEQ ID NO: 1222 - DNA, 50 bp, Artificial Sequence
  Synthetic oligonucleotide
ttggcgtcgcgagcgagcggtggacttgccggctgggtgcaagcagggcg

SEQ ID NO: 1223 - DNA, 50 bp, Artificial Sequence
  Synthetic oligonucleotide
ggaagggccgcctcactcacctcgggcgccagtaggtgcaggctgggtcg

SEQ ID NO: 1224 - DNA, 50 bp, Artificial Sequence
  Synthetic oligonucleotide
cggctgaggcaggctccgcagaccccgagccagagtgggatttaacggcg

SEQ ID NO: 1225 - DNA, 50 bp, Artificial Sequence
  Synthetic oligonucleotide
cgacaaggagatctgcatgatcaaggtagagatccaggacatcaacgaca

SEQ ID NO: 1226 - DNA, 50 bp, Artificial Sequence
  Synthetic oligonucleotide
cggatatcgcgaaagacacagcttagcccagagcctatgctaagaaccct

SEQ ID NO: 1227 - DNA, 50 bp, Artificial Sequence
  Synthetic oligonucleotide
cgggtagtagacatgcttctggaagggctgcggggggcacaaagagagcg

SEQ ID NO: 1228 - DNA, 50 bp, Artificial Sequence
  Synthetic oligonucleotide
cggaaacttgaaggcctaaaaaattagctgaccttgttaaaaatgttggc

SEQ ID NO: 1229 - DNA, 50 bp, Artificial Sequence
  Synthetic oligonucleotide
gacccctgggacaggcaactctggggccgtgtgacctccaggacggttcg

SEQ ID NO: 1230 - DNA, 50 bp, Artificial Sequence
  Synthetic oligonucleotide
tgattcctgctccctaagcctggctccctgtggtgggggctggaatgccg

SEQ ID NO: 1231 - DNA, 50 bp, Artificial Sequence
  Synthetic oligonucleotide
cggttagaacgcgctctacatccgctttaaagacagaggtctagacgtga

SEQ ID NO: 1232 - DNA, 50 bp, Artificial Sequence
  Synthetic oligonucleotide
cggccccgccccctgatccggtccggactcctaggcccgcccctacctaa

SEQ ID NO: 1233 - DNA, 50 bp, Artificial Sequence
  Synthetic oligonucleotide
cgcaagtcatcactgcaaagcctggcccagccatgggaacaactgcattc

SEQ ID NO: 1234 - DNA, 50 bp, Artificial Sequence
  Synthetic oligonucleotide
cttccccagcgtggggcggagctcgtggtgctggcctggagggacacacg

SEQ ID NO: 1235 - DNA, 50 bp, Artificial Sequence
  Synthetic oligonucleotide
cggtattgggagaaagtgaggcacctacaggctaaacctgtggccaaaca

SEQ ID NO: 1236 - DNA, 50 bp, Artificial Sequence
  Synthetic oligonucleotide
acgcagaccccagctcaaggctgcaccgttgccatggagacggttgggcg

SEQ ID NO: 1237 - DNA, 50 bp, Artificial Sequence
  Synthetic oligonucleotide
cgagcagccactcttggagaaatggggaatggcgctgtaaaagcgcaggc

SEQ ID NO: 1238 - DNA, 50 bp, Artificial Sequence
  Synthetic oligonucleotide
tcatctctgaaccagatactaaaaatcctccaggcgagtggagaggaccg

SEQ ID NO: 1239 - DNA, 50 bp, Artificial Sequence
  Synthetic oligonucleotide
cgccaaccctgaaggtacgtccctcgctcgggtttgcccgtccgtccttc

SEQ ID NO: 1240 - DNA, 50 bp, Artificial Sequence
  Synthetic oligonucleotide
tcagggatgtggacgatggccatcccaagactgccccagccaaggcaccg

SEQ ID NO: 1241 - DNA, 50 bp, Artificial Sequence
  Synthetic oligonucleotide
gctgcctccactctaggatacagattcagattttgggaacctggggtgcg

SEQ ID NO: 1242 - DNA, 50 bp, Artificial Sequence
  Synthetic oligonucleotide
aagcgcttgcttacgtagctgcggagcgagcctctgcttcattacgagcg

SEQ ID NO: 1243 - DNA, 50 bp, Artificial Sequence
  Synthetic oligonucleotide
cgcctcacgtctggccttgcagaagtccggagttccggctctgaactgga

SEQ ID NO: 1244 - DNA, 50 bp, Artificial Sequence
  Synthetic oligonucleotide
tccggcagggagcggaccgtggtggaggcctctgagccgagcaggccacg

SEQ ID NO: 1245 - DNA, 50 bp, Artificial Sequence
  Synthetic oligonucleotide
cgcgtatctgagagcaacgtctttatcatcagcacggtgcgttccctgca

SEQ ID NO: 1246 - DNA, 50 bp, Artificial Sequence
  Synthetic oligonucleotide
cgccttgcagcgcagctcggatcagcagcagcccaggaggcctcccgccc

SEQ ID NO: 1247 - DNA, 50 bp, Artificial Sequence
  Synthetic oligonucleotide
ttacttggagctggtgtacttggtgaccgccttggtgccctccgacaccg

SEQ ID NO: 1248 - DNA, 50 bp, Artificial Sequence
  Synthetic oligonucleotide
tgaacccctcaagtttataaatcacttggtaatcttggccctgcttttcg

SEQ ID NO: 1249 - DNA, 50 bp, Artificial Sequence
  Synthetic oligonucleotide
agagcaaacgtcagggattattatgtcgattttccgaggaccagggttcg

SEQ ID NO: 1250 - DNA, 50 bp, Artificial Sequence
  Synthetic oligonucleotide
cacttagctaaagccatttcctatgctccttccagacaggttttgcaacg

SEQ ID NO: 1251 - DNA, 50 bp, Artificial Sequence
  Synthetic oligonucleotide
ccatgggtctttgggtgttggaataaaacccaaactggacaaagagctcg

SEQ ID NO: 1252 - DNA, 50 bp, Artificial Sequence
  Synthetic oligonucleotide
tgaatgtcatcgaagaagctcctgatttagattttaactgtacgtaaacg

SEQ ID NO: 1253 - DNA, 50 bp, Artificial Sequence
  Synthetic oligonucleotide
cggccctgcgcagctgccccatgtgccagaaggagttcgcccccaggtga

SEQ ID NO: 1254 - DNA, 50 bp, Artificial Sequence
  Synthetic oligonucleotide
tcaaatggtgaaatctgagcttccaaaaatacctactgtcgagcacctcg

SEQ ID NO: 1255 - DNA, 50 bp, Artificial Sequence
  Synthetic oligonucleotide
cgccccgcaagcgggtcgggcccgccccaacagccctcggctctcctctc

SEQ ID NO: 1256 - DNA, 50 bp, Artificial Sequence
  Synthetic oligonucleotide
acaaggtaccatctcatggcctcttggttcaaatccgttttcttgctccg

SEQ ID NO: 1257 - DNA, 50 bp, Artificial Sequence
  Synthetic oligonucleotide
cgcctctcccgcccgtgggatgtcaggtctgttgtcaggcccacgaaggc

SEQ ID NO: 1258 - DNA, 50 bp, Artificial Sequence
  Synthetic oligonucleotide
attaatctatatcaaaaggtcagtccttaaggggtctgctccatttctcg

SEQ ID NO: 1259 - DNA, 50 bp, Artificial Sequence
  Synthetic oligonucleotide
gtaggcaagcgcagggggcgggcggccgaggagcgctttcgaattaatcg

SEQ ID NO: 1260 - DNA, 50 bp, Artificial Sequence
  Synthetic oligonucleotide
ctggagaatgcagacgtggatcctgcaggccgctgcctcccaagtgagcg

SEQ ID NO: 1261 - DNA, 50 bp, Artificial Sequence
  Synthetic oligonucleotide
cggcgccagggccccctcagcgctgctcctgggcagtctctgtgtcctcc

SEQ ID NO: 1262 - DNA, 50 bp, Artificial Sequence
  Synthetic oligonucleotide
gcagggcttctataccagcaagattcataagcatgagcagatttgattcg

SEQ ID NO: 1263 - DNA, 50 bp, Artificial Sequence
  Synthetic oligonucleotide
cgccgggacacaggctcaccttcctgagcccaggccactgggaccaagct

SEQ ID NO: 1264 - DNA, 50 bp, Artificial Sequence
  Synthetic oligonucleotide
agtgtggcgacctggcagctgcagcgggactcagcttttgggaactgtcg

SEQ ID NO: 1265 - DNA, 50 bp, Artificial Sequence
  Synthetic oligonucleotide
ggatttggtctaggctttctggcttggccctggaactctcagcaaggacg

SEQ ID NO: 1266 - DNA, 50 bp, Artificial Sequence
  Synthetic oligonucleotide
cgtccggggttcggctgcctcgacctgcccgattttccgctgcccccaac

SEQ ID NO: 1267 - DNA, 50 bp, Artificial Sequence
  Synthetic oligonucleotide
cgcagcaaaacttagttgagtagaaataagctcccgtatgaacaccgggc

SEQ ID NO: 1268 - DNA, 50 bp, Artificial Sequence
  Synthetic oligonucleotide
ctgatgagcagcttgcccgcgtaggcggtgggcacgcagcagggtgggcg

SEQ ID NO: 1269 - DNA, 50 bp, Artificial Sequence
  Synthetic oligonucleotide
agttcgaactactgggggaactcaagactgcgtgccttagacctatcccg

SEQ ID NO: 1270 - DNA, 50 bp, Artificial Sequence
  Synthetic oligonucleotide
cgcgcagaccgagcagactgccgcagcgactcatcctatcgataaggttc

SEQ ID NO: 1271 - DNA, 50 bp, Artificial Sequence
  Synthetic oligonucleotide
cgctgcgtcttctgcggcgcaaatctttcgaccctctgcgctctgccggg

SEQ ID NO: 1272 - DNA, 50 bp, Artificial Sequence
  Synthetic oligonucleotide
cgctgagtaataagtgtgaagtttagaacacaaaccttgcaagagctttc

SEQ ID NO: 1273 - DNA, 50 bp, Artificial Sequence
  Synthetic oligonucleotide
agccgggaaggggcgggccctggctgcgggaagccccgtggagggtagcg

SEQ ID NO: 1274 - DNA, 50 bp, Artificial Sequence
  Synthetic oligonucleotide
cgccacgcgcaccagatcgcgctgcagcagcactgcctggcgccacccca

SEQ ID NO: 1275 - DNA, 50 bp, Artificial Sequence
  Synthetic oligonucleotide
cgccccaccccctgccgcctgcgggcatcgctttatgacgtcaccacgtg

SEQ ID NO: 1276 - DNA, 50 bp, Artificial Sequence
  Synthetic oligonucleotide
cggggctcggcctcgccagcttccctacccagccctgaggctccacgagt

SEQ ID NO: 1277 - DNA, 50 bp, Artificial Sequence
  Synthetic oligonucleotide
cggaaggtctgggaactgggagcaggaaaaatgaaagccgcctatctcca

SEQ ID NO: 1278 - DNA, 50 bp, Artificial Sequence
  Synthetic oligonucleotide
gtgtcaacagggccaagaggatccagaagagtgggcctgcactcttttcg

SEQ ID NO: 1279 - DNA, 50 bp, Artificial Sequence
  Synthetic oligonucleotide
cggccctcaccctgtttttggtgtggaattcatcagccagagtgaaagag

SEQ ID NO: 1280 - DNA, 50 bp, Artificial Sequence
  Synthetic oligonucleotide
cggccagagaaatgggccgaaattactgccagacacatccgaccttagta

SEQ ID NO: 1281 - DNA, 50 bp, Artificial Sequence
  Synthetic oligonucleotide
cattcgtgctattataaatcaaacagcaacagggcatgattaaacacacg

SEQ ID NO: 1282 - DNA, 50 bp, Artificial Sequence
  Synthetic oligonucleotide
aattgatcagaagttagaccggaggctctgtcaagtcacggccacggccg

SEQ ID NO: 1283 - DNA, 50 bp, Artificial Sequence
  Synthetic oligonucleotide
ttcttccctgtgactcagccctggaggaatttcccttttgaaatcttgcg

SEQ ID NO: 1284 - DNA, 50 bp, Artificial Sequence
  Synthetic oligonucleotide
cgcagactaaccgagaagagaggattcaaaaatgaagtgattcatccaat

SEQ ID NO: 1285 - DNA, 50 bp, Artificial Sequence
  Synthetic oligonucleotide
atccctcagtctccgtctcctttgcacacaggagttgggaggcttcagcg

SEQ ID NO: 1286 - DNA, 50 bp, Artificial Sequence
  Synthetic oligonucleotide
cgcccttggacattactctctggatacaacggagagtgtgccaaggctta

SEQ ID NO: 1287 - DNA, 50 bp, Artificial Sequence
  Synthetic oligonucleotide
ctttgcctgagccacaagggaccggaggaatggggttcattcccacgccg

SEQ ID NO: 1288 - DNA, 50 bp, Artificial Sequence
  Synthetic oligonucleotide
aatacaaagtaagcgaactgtgcttcccctacagctgcaagcccagagcg

SEQ ID NO: 1289 - DNA, 50 bp, Artificial Sequence
  Synthetic oligonucleotide
catctttcacgtggggcagcggaggcctggcggggacggggagccgctcg

SEQ ID NO: 1290 - DNA, 50 bp, Artificial Sequence
  Synthetic oligonucleotide
cgggccctggcaaaatgggcttttattctgctcaacaacaggagggaaag

SEQ ID NO: 1291 - DNA, 50 bp, Artificial Sequence
  Synthetic oligonucleotide
cgcgcgatgcctagaagtgctctggtgtcactcccctgtataggacctgg

SEQ ID NO: 1292 - DNA, 50 bp, Artificial Sequence
  Synthetic oligonucleotide
cgccctagaagcgacctgaatggaaaaatctgcacacgaactaatgggtt

SEQ ID NO: 1293 - DNA, 50 bp, Artificial Sequence
  Synthetic oligonucleotide
gcgggcggggcatgggggtggtctgcgcgctctgggcgggctgcagagcg

SEQ ID NO: 1294 - DNA, 50 bp, Artificial Sequence
  Synthetic oligonucleotide
ggccccgtgggtcaggtgttgcccctgagagatgagcaaggaccggtccg

SEQ ID NO: 1295 - DNA, 50 bp, Artificial Sequence
  Synthetic oligonucleotide
cgctctcgggggcctttggctccaggcaacttggggcaagcgtctcagtt

SEQ ID NO: 1296 - DNA, 50 bp, Artificial Sequence
  Synthetic oligonucleotide
cgcctctctctgtggaagacgcgcttgtctcaagccccgatgctctcaaa

SEQ ID NO: 1297 - DNA, 50 bp, Artificial Sequence
  Synthetic oligonucleotide
cggtctcagctacaacggcgtgcatgccaattacgcctgcaggctaccgc

SEQ ID NO: 1298 - DNA, 50 bp, Artificial Sequence
  Synthetic oligonucleotide
cccaagcaggtgaggcgcggcacagggcggagacaggtgagggggcaacg

SEQ ID NO: 1299 - DNA, 50 bp, Artificial Sequence
  Synthetic oligonucleotide
cggccgaactcggcagctccaacccaactcggcttaactccgcctcaccg

SEQ ID NO: 1300 - DNA, 50 bp, Artificial Sequence
  Synthetic oligonucleotide
cggctgctcctacttcactgttctctggccccgagtttgagaagaggggg

SEQ ID NO: 1301 - DNA, 50 bp, Artificial Sequence
  Synthetic oligonucleotide
agccctccgagaaatcgtacgttcctctcacttactttgagttggaaacg

SEQ ID NO: 1302 - DNA, 50 bp, Artificial Sequence
  Synthetic oligonucleotide
cggctgcggaccacaaagaccacagaatcccgaagccgattcctcagacc

SEQ ID NO: 1303 - DNA, 50 bp, Artificial Sequence
  Synthetic oligonucleotide
cgggaagaaacacagaatcaaagtgttgctcaagggtgctttctgatcca

SEQ ID NO: 1304 - DNA, 50 bp, Artificial Sequence
  Synthetic oligonucleotide
cgcgggtgctgaacgcgcccttctaagctggtgtgttagcacctgttcat

SEQ ID NO: 1305 - DNA, 50 bp, Artificial Sequence
  Synthetic oligonucleotide
gcatcccagtgattcttgggttccgcgtgtagtttcggaaggagacatcg

SEQ ID NO: 1306 - DNA, 50 bp, Artificial Sequence
  Synthetic oligonucleotide
tcatcagagttcccccttttgttccaagtcccggagcagacaaagaggcg

SEQ ID NO: 1307 - DNA, 50 bp, Artificial Sequence
  Synthetic oligonucleotide
cgggcctcgtcccttaattctagaaatagcgatcgcgaaagctaagtgcc

SEQ ID NO: 1308 - DNA, 50 bp, Artificial Sequence
  Synthetic oligonucleotide
taattatccctaatgagggcccagccccggagcttgttaaaggatttccg

SEQ ID NO: 1309 - DNA, 50 bp, Artificial Sequence
  Synthetic oligonucleotide
cgccccaagataagttagtttccctggcagatttccagcgagctggctct

SEQ ID NO: 1310 - DNA, 50 bp, Artificial Sequence
  Synthetic oligonucleotide
cgccggctgtcacccgcaccggatctgcttccagggcttggtttcgcttt

SEQ ID NO: 1311 - DNA, 50 bp, Artificial Sequence
  Synthetic oligonucleotide
cgaggttgggcctttgcctgaatctgttgctattgctccccttgctaccg

SEQ ID NO: 1312 - DNA, 50 bp, Artificial Sequence
  Synthetic oligonucleotide
atctgcgtgggacacagtgactcctagaagggtatcccaggattttagcg

SEQ ID NO: 1313 - DNA, 50 bp, Artificial Sequence
  Synthetic oligonucleotide
cgccgctgcggctcagttccgccccctccgcaggctccacccacggctca

SEQ ID NO: 1314 - DNA, 50 bp, Artificial Sequence
  Synthetic oligonucleotide
cgctccagcgctctgcagcccgcccagagcgcgcagaccacccccatgcc

SEQ ID NO: 1315 - DNA, 50 bp, Artificial Sequence
  Synthetic oligonucleotide
cgggaagcctttctgccgcccaggcccacaggtctcgagacgcacatgca

SEQ ID NO: 1316 - DNA, 50 bp, Artificial Sequence
  Synthetic oligonucleotide
gatgacgcttgattgtctgaagtccccacttcgttctgcctccggagacg

SEQ ID NO: 1317 - DNA, 50 bp, Artificial Sequence
  Synthetic oligonucleotide
aatgcgctctccaaatggggagtctgttggggaggccctggcgggagccg

SEQ ID NO: 1318 - DNA, 50 bp, Artificial Sequence
  Synthetic oligonucleotide
cgacgcctgcagcttctctggcttccgtccagccacgctaactgtcacaa

SEQ ID NO: 1319 - DNA, 50 bp, Artificial Sequence
  Synthetic oligonucleotide
acagttccattcttttcccatcctccaccttggctaactgaaccttatcg

SEQ ID NO: 1320 - DNA, 50 bp, Artificial Sequence
  Synthetic oligonucleotide
ggggatttgcgtttgggggtcagcatatcctcgcactctcccaacattcg

SEQ ID NO: 1321 - DNA, 50 bp, Artificial Sequence
  Synthetic oligonucleotide
ttgctgttattacacacacaggccttcctgtctggtcgttagaaaagccg

SEQ ID NO: 1322 - DNA, 50 bp, Artificial Sequence
  Synthetic oligonucleotide
aggggagccttcccatttttctggcctcaaaagtaaagcagcattagacg

SEQ ID NO: 1323 - DNA, 50 bp, Artificial Sequence
  Synthetic oligonucleotide
cggggagccccgcagagcaaaaccaaggaagatgtcttctctgctcgtct

SEQ ID NO: 1324 - DNA, 50 bp, Artificial Sequence
  Synthetic oligonucleotide
cggcaaagctacagagggaaactaagtcactcgcctgcaaaacgaggttt

SEQ ID NO: 1325 - DNA, 50 bp, Artificial Sequence
  Synthetic oligonucleotide
cgcaggtttgtccccagttgatagttccgtgagttcctcaattattcctc

SEQ ID NO: 1326 - DNA, 50 bp, Artificial Sequence
  Synthetic oligonucleotide
cgcgccccactccgcccaaggggagagccccacggaccattgtggcttgc

SEQ ID NO: 1327 - DNA, 50 bp, Artificial Sequence
  Synthetic oligonucleotide
cgggcctcaagtccctgcccgccatgccccagggccctcagctccaccac

SEQ ID NO: 1328 - DNA, 50 bp, Artificial Sequence
  Synthetic oligonucleotide
aatagcgttacttgtgcaacacaacatatataatggaaaaggccgatgcg

SEQ ID NO: 1329 - DNA, 50 bp, Artificial Sequence
  Synthetic oligonucleotide
gtcgttgccatgacaccgcgggcaggtgggcggctctggcggctgtttcg

SEQ ID NO: 1330 - DNA, 50 bp, Artificial Sequence
  Synthetic oligonucleotide
cgcgcaccacgtactgcgccaccttgaaggagctcaggtactcgttcatg

SEQ ID NO: 1331 - DNA, 50 bp, Artificial Sequence
  Synthetic oligonucleotide
cgcctccagacctcggttcccgctccagcacgttaagcagggcgcactca

SEQ ID NO: 1332 - DNA, 50 bp, Artificial Sequence
  Synthetic oligonucleotide
caagaaggaggtcagccgggtgctgtgcaagcggtgcggtaagttcctcg

SEQ ID NO: 1333 - DNA, 50 bp, Artificial Sequence
  Synthetic oligonucleotide
gccctggctctggtctgaggttgcccttgaacgatttcgaggctccctcg

SEQ ID NO: 1334 - DNA, 50 bp, Artificial Sequence
  Synthetic oligonucleotide
cttacttagcgtgcgagacaggctggtagtgcgagcggccagtggtggcg

SEQ ID NO: 1335 - DNA, 50 bp, Artificial Sequence
  Synthetic oligonucleotide
cgcggcctgacccccgaggcaaggggtcccaggagttgaccctcaaattg

SEQ ID NO: 1336 - DNA, 50 bp, Artificial Sequence
  Synthetic oligonucleotide
cggcccagccgggaggcggcgcacagccaacagcacccccacccccaccc

SEQ ID NO: 1337 - DNA, 50 bp, Artificial Sequence
  Synthetic oligonucleotide
cggccgccagacgttgcctacagtctcggctctgtctcccacggctgtgg

SEQ ID NO: 1338 - DNA, 50 bp, Artificial Sequence
  Synthetic oligonucleotide
gagcatgctcagttcatatgactgattttcactaagtgtaacaatcaacg

SEQ ID NO: 1339 - DNA, 50 bp, Artificial Sequence
  Synthetic oligonucleotide
ctcagacccagcaggaagggcgagcgcactgaggctgggaaacgcaggcg

SEQ ID NO: 1340 - DNA, 50 bp, Artificial Sequence
  Synthetic oligonucleotide
cgccatgagtcatgcaaggactgggcgacagaagctctgagcttctattt

SEQ ID NO: 1341 - DNA, 50 bp, Artificial Sequence
  Synthetic oligonucleotide
cggcgcggatgccccagcagcccccgctccactacgccaagccctcgccc

SEQ ID NO: 1342 - DNA, 50 bp, Artificial Sequence
  Synthetic oligonucleotide
cgggcgggccgctggagtttatcagctccaggacaaatctgcctctgacc

SEQ ID NO: 1343 - DNA, 50 bp, Artificial Sequence
  Synthetic oligonucleotide
taccgagagacggctgtgggggaggctcctgcgggagaaatggccaaacg

SEQ ID NO: 1344 - DNA, 50 bp, Artificial Sequence
  Synthetic oligonucleotide
cggtgacgaagcttcgagcagcgccgaacagccccagccccagctcccgc

SEQ ID NO: 1345 - DNA, 50 bp, Artificial Sequence
  Synthetic oligonucleotide
cgaagccttctagataaatactgtgtagaatatggtgtgggtgtcattgg

SEQ ID NO: 1346 - DNA, 50 bp, Artificial Sequence
  Synthetic oligonucleotide
cgtgcgcgctaaaaacccacttcaaagtctgttcccggcacgggggcggc

SEQ ID NO: 1347 - DNA, 50 bp, Artificial Sequence
  Synthetic oligonucleotide
agtggtaggcaggatgtagaccagggcgggcgcagccctggcgcatagcg

SEQ ID NO: 1348 - DNA, 50 bp, Artificial Sequence
  Synthetic oligonucleotide
ccttcctgagcccaggccactgggaccaagctgatactcagaaacagccg

SEQ ID NO: 1349 - DNA, 50 bp, Artificial Sequence
  Synthetic oligonucleotide
tctgctgtcaggccgggaaaaagtgtccgaacgcctcgtggactgcagcg

SEQ ID NO: 1350 - DNA, 50 bp, Artificial Sequence
  Synthetic oligonucleotide
cgctctgtctgttcggaacagatgtcggccctcggaggggtttctctgcc

SEQ ID NO: 1351 - DNA, 50 bp, Artificial Sequence
  Synthetic oligonucleotide
cgctccgcggcggaggcgacccagtttcccagctctcgtcctcgccactt

SEQ ID NO: 1352 - DNA, 50 bp, Artificial Sequence
  Synthetic oligonucleotide
cgaagctcaccgtgccagcctatgtactgttttcgtcttatcctgtagcg

SEQ ID NO: 1353 - DNA, 50 bp, Artificial Sequence
  Synthetic oligonucleotide
acctggcgctcaaaggcgaggtgctcgctgaggtgggaccaggtgaaacg

SEQ ID NO: 1354 - DNA, 50 bp, Artificial Sequence
  Synthetic oligonucleotide
cgtagttacttgtattgctttacatttgctcgtcccagtgtgtgagggcc

SEQ ID NO: 1355 - DNA, 50 bp, Artificial Sequence
  Synthetic oligonucleotide
ctgtggtaccaaaggatctacacagctatgtttggccgaaataatttccg

SEQ ID NO: 1356 - DNA, 50 bp, Artificial Sequence
  Synthetic oligonucleotide
aatttggtgcacaagaggtgcacagcaaacgcctgtggaatgagtgaacg

SEQ ID NO: 1357 - DNA, 50 bp, Artificial Sequence
  Synthetic oligonucleotide
cgaacctgtacagaagacgctcccatgggtgggcgaggtagctgccaccc

SEQ ID NO: 1358 - DNA, 50 bp, Artificial Sequence
  Synthetic oligonucleotide
cgcgaggagcaaatggaacagcacaagctgcccgcagcccgcaccatcgc

SEQ ID NO: 1359 - DNA, 50 bp, Artificial Sequence
  Synthetic oligonucleotide
atatcaaagctgggagagactccggctctgcatatgagcgactctgttcg

SEQ ID NO: 1360 - DNA, 50 bp, Artificial Sequence
  Synthetic oligonucleotide
gcacatgaccagaggcggccggtaatcagggcagagtctggtgtggaccg

SEQ ID NO: 1361 - DNA, 50 bp, Artificial Sequence
  Synthetic oligonucleotide
cggctgggttaattcatgatgtttgcccttttaataaaatataagggtag

SEQ ID NO: 1362 - DNA, 50 bp, Artificial Sequence
  Synthetic oligonucleotide
cgcgtttcccggacagtgaggcaggacctaaactcttccgttaacactac

SEQ ID NO: 1363 - DNA, 50 bp, Artificial Sequence
  Synthetic oligonucleotide
cggagcttgtagcgggtagggactccacacaccagggaaccctacagaac

SEQ ID NO: 1364 - DNA, 50 bp, Artificial Sequence
  Synthetic oligonucleotide
cgggctcaggacgcctaggcgtccaagctgtgttccccaccgcgccccac

SEQ ID NO: 1365 - DNA, 50 bp, Artificial Sequence
  Synthetic oligonucleotide
cagcccgccagggtgtcactggagacagaatggaggtgctgccggactcg

SEQ ID NO: 1366 - DNA, 50 bp, Artificial Sequence
  Synthetic oligonucleotide
gtgcttccctcaaaagggcataaaggccccctttcttctgctctcctgcg

SEQ ID NO: 1367 - DNA, 50 bp, Artificial Sequence
  Synthetic oligonucleotide
tcatccccccgggcgctgagtccttcatgtcctatgggctgtgtaggacg

SEQ ID NO: 1368 - DNA, 50 bp, Artificial Sequence
  Synthetic oligonucleotide
catagcattgcctggctgggaagttcaatgtgttcacagccaataccacg

SEQ ID NO: 1369 - DNA, 50 bp, Artificial Sequence
  Synthetic oligonucleotide
cgtgaatactctgtgactggcttgctgaaacacagcttgaaatccctgtt

SEQ ID NO: 1370 - DNA, 50 bp, Artificial Sequence
  Synthetic oligonucleotide
cggggtctggtggtgtgcactctgctgctccatttgctgtccagttgttt

SEQ ID NO: 1371 - DNA, 50 bp, Artificial Sequence
  Synthetic oligonucleotide
acagagagccgcaggggccggctctgggtactgctggggcagggcctccg

SEQ ID NO: 1372 - DNA, 50 bp, Artificial Sequence
  Synthetic oligonucleotide
cgggcatacgctgttttctgtatatgggtttaccctccaacccatataca

SEQ ID NO: 1373 - DNA, 50 bp, Artificial Sequence
  Synthetic oligonucleotide
ctgtccttccctgagcagccgggcctagagtcaaggcgcgatgattgccg

SEQ ID NO: 1374 - DNA, 50 bp, Artificial Sequence
  Synthetic oligonucleotide
cggctcacagtgttccagaccccccttaagggtgaagccccagggtgccc

SEQ ID NO: 1375 - DNA, 50 bp, Artificial Sequence
  Synthetic oligonucleotide
gtctagaatcaatacggcccagacagcccttcacaaaggggctccaggcg

SEQ ID NO: 1376 - DNA, 50 bp, Artificial Sequence
  Synthetic oligonucleotide
cgccagccgccagctgctgagtcacttttgtcaaagagtggcctcggccc

SEQ ID NO: 1377 - DNA, 50 bp, Artificial Sequence
  Synthetic oligonucleotide
gtgaagcatctcataaaccactgcctttctgatattggtctctttgttcg

SEQ ID NO: 1378 - DNA, 50 bp, Artificial Sequence
  Synthetic oligonucleotide
gactcagttcctattaggtgttccggtttgttcattctcaaagggacccg

SEQ ID NO: 1379 - DNA, 50 bp, Artificial Sequence
  Synthetic oligonucleotide
cgttgagaggacgtcaacgaatctatttgttgggctgaatccttccccag

SEQ ID NO: 1380 - DNA, 50 bp, Artificial Sequence
  Synthetic oligonucleotide
gtttctggcgagcaggagtgtggcgatcttggagagcttgcgcaccgacg

SEQ ID NO: 1381 - DNA, 50 bp, Artificial Sequence
  Synthetic oligonucleotide
ctcggcgcggtcttggtctgggtcggtggggttgggccgggagacccgcg

SEQ ID NO: 1382 - DNA, 50 bp, Artificial Sequence
  Synthetic oligonucleotide
cgcctacgcactcggagcacaggttacaacttccagaaacccttgggacg

SEQ ID NO: 1383 - DNA, 50 bp, Artificial Sequence
  Synthetic oligonucleotide
acaatttcaagtgttgacagcatctgctaagtcttcagaatctcagctcg

SEQ ID NO: 1384 - DNA, 50 bp, Artificial Sequence
  Synthetic oligonucleotide
gaggcagagctgcctccacacccggtgccagggggttggggttggcagcg

SEQ ID NO: 1385 - DNA, 50 bp, Artificial Sequence
  Synthetic oligonucleotide
tccgggaactggtgcacgcaagagcttaactgatttcgccgcggtctgcg

SEQ ID NO: 1386 - DNA, 50 bp, Artificial Sequence
  Synthetic oligonucleotide
gcatgagactctctggttgtgttccgttcgcactcaaagtcctcgaatcg

SEQ ID NO: 1387 - DNA, 50 bp, Artificial Sequence
  Synthetic oligonucleotide
ccagcagcccaagacagcatgagaggtgctagcccaaatattgacctacg

SEQ ID NO: 1388 - DNA, 50 bp, Artificial Sequence
  Synthetic oligonucleotide
cgcagcccacaccctgggggtccacccgggctctgcaccccgcccacctc

SEQ ID NO: 1389 - DNA, 50 bp, Artificial Sequence
  Synthetic oligonucleotide
gacggatttgcaaaagcaggcgagtcgtgcagaggctcctaaaatgcccg

SEQ ID NO: 1390 - DNA, 50 bp, Artificial Sequence
  Synthetic oligonucleotide
gggagggcctacggagggagcggccccaggcgctttctagagcgtgagcg

SEQ ID NO: 1391 - DNA, 50 bp, Artificial Sequence
  Synthetic oligonucleotide
gagatttcaagtgtccacacttctagtttagacatttggcaaccaattcg

SEQ ID NO: 1392 - DNA, 50 bp, Artificial Sequence
  Synthetic oligonucleotide
cgcgttcaaagattttgttttcacggctgagggggcttttttccaatgta

SEQ ID NO: 1393 - DNA, 50 bp, Artificial Sequence
  Synthetic oligonucleotide
cgcagaaagggagcccactgagaccgcaggggctgacaaatcactgctaa

SEQ ID NO: 1394 - DNA, 50 bp, Artificial Sequence
  Synthetic oligonucleotide
gacctgagccactgcacccggctaagcgttcctttttttaaaaaaaatcg

SEQ ID NO: 1395 - DNA, 50 bp, Artificial Sequence
  Synthetic oligonucleotide
cgatgttaggggcgtttttcattttgatgttggtttttgatattaccacc

SEQ ID NO: 1396 - DNA, 50 bp, Artificial Sequence
  Synthetic oligonucleotide
cgcaggccactataggaggcagaacagtaaacagatcattgaaaagacct

SEQ ID NO: 1397 - DNA, 50 bp, Artificial Sequence
  Synthetic oligonucleotide
tgttccaggcctgacgggtgttcagggtgtaggactcagggtgtaggacg

SEQ ID NO: 1398 - DNA, 50 bp, Artificial Sequence
  Synthetic oligonucleotide
gcctctgtactgctctgtagtctctgctaggacatggacgaaaagggacg

SEQ ID NO: 1399 - DNA, 50 bp, Artificial Sequence
  Synthetic oligonucleotide
ctagctgggaggtgatggggactgcctgtcattcctgtcagtctctcacg

SEQ ID NO: 1400 - DNA, 50 bp, Artificial Sequence
  Synthetic oligonucleotide
atcattctccggactttaaaggacaaactaaatggagacccaccaatgcg

SEQ ID NO: 1401 - DNA, 50 bp, Artificial Sequence
  Synthetic oligonucleotide
tccacaaagctgcccccacttcgtaagggcctgtgcctggagggtcgtcg

SEQ ID NO: 1402 - DNA, 50 bp, Artificial Sequence
  Synthetic oligonucleotide
cggttgccgagctctgcctacctctgaaaggcctagagagcagagttctc

SEQ ID NO: 1403 - DNA, 50 bp, Artificial Sequence
  Synthetic oligonucleotide
cgctcttgggccaaaagcgggatgaggggaggagccaagagcagccaatc

SEQ ID NO: 1404 - DNA, 50 bp, Artificial Sequence
  Synthetic oligonucleotide
cttgactgaactagcttcttatctgtatgatagagaaacatgccaaagcg

SEQ ID NO: 1405 - DNA, 50 bp, Artificial Sequence
  Synthetic oligonucleotide
tcccaggacttacaatgtttgctaagacgcaagagggtgtgacacagacg

SEQ ID NO: 1406 - DNA, 50 bp, Artificial Sequence
  Synthetic oligonucleotide
cgccaattattgcagcgccgcagcccctttgttgatacagtagtccgaaa

SEQ ID NO: 1407 - DNA, 50 bp, Artificial Sequence
  Synthetic oligonucleotide
gtttcacctccactgccctggaggtagaactggtggtgaaggtatctacg

SEQ ID NO: 1408 - DNA, 50 bp, Artificial Sequence
  Synthetic oligonucleotide
cggccgcagtgagccagctgcagcctgggagcacagtgtgaacctgccag

SEQ ID NO: 1409 - DNA, 50 bp, Artificial Sequence
  Synthetic oligonucleotide
cggcgcccagcccatccgacttttgtaacactcagaattgtagttttgtt

SEQ ID NO: 1410 - DNA, 50 bp, Artificial Sequence
  Synthetic oligonucleotide
cggggcagttcagcaaccccgaccccacccgcgtggctccaggcccaggg

SEQ ID NO: 1411 - DNA, 50 bp, Artificial Sequence
  Synthetic oligonucleotide
cagaggggtgcggtggggcctaggaggctcgtgggcgattccgagcaccg

SEQ ID NO: 1412 - DNA, 50 bp, Artificial Sequence
  Synthetic oligonucleotide
gagattaacgtcacctctcctgcaagagcggttaagaggcagaatcaccg

SEQ ID NO: 1413 - DNA, 50 bp, Artificial Sequence
  Synthetic oligonucleotide
cctttgtctcccaagtggagtggttctaaatttctgataaccaatgagcg

SEQ ID NO: 1414 - DNA, 50 bp, Artificial Sequence
  Synthetic oligonucleotide
cgcggtcctcccgcaacacctgcagccccgcaagcgagcgcactcggagc

SEQ ID NO: 1415 - DNA, 50 bp, Artificial Sequence
  Synthetic oligonucleotide
tttccgtgacaaacccattagttcgtgtgcagatttttccattcaggtcg

SEQ ID NO: 1416 - DNA, 50 bp, Artificial Sequence
  Synthetic oligonucleotide
ctgagcgcactccttccactgtactgggggtgtacagtgaggagtggacg

SEQ ID NO: 1417 - DNA, 50 bp, Artificial Sequence
  Synthetic oligonucleotide
gttcttagtctcctgtccccaaacttcttagagttattcctgttggaccg

SEQ ID NO: 1418 - DNA, 50 bp, Artificial Sequence
  Synthetic oligonucleotide
cgcagaagagcaggctattggagcaatccgaaccctgcgcagcaaaagaa

SEQ ID NO: 1419 - DNA, 50 bp, Artificial Sequence
  Synthetic oligonucleotide
cgggaatcccgcaccacggggaactctccaccctgtccccgaagttttgg

SEQ ID NO: 1420 - DNA, 50 bp, Artificial Sequence
  Synthetic oligonucleotide
gcagtggccggggtcttctctggccagatctgagggacctctgagctgcg

SEQ ID NO: 1421 - DNA, 50 bp, Artificial Sequence
  Synthetic oligonucleotide
cgaccaagacttttgcccttttgaaatgaaatagaaataggggagctgca

SEQ ID NO: 1422 - DNA, 50 bp, Artificial Sequence
  Synthetic oligonucleotide
tctgcggctctggccgggggtcggggctgttatctgcatgtgtgcgtgcg

SEQ ID NO: 1423 - DNA, 50 bp, Artificial Sequence
  Synthetic oligonucleotide
cggagtctgcgaacggagtctccgctgccgccgctcagccctcagtcctt

SEQ ID NO: 1424 - DNA, 50 bp, Artificial Sequence
  Synthetic oligonucleotide
cggcccgcccaactgctgccgccgcatctgcagaaaccactcgtgttgag

SEQ ID NO: 1425 - DNA, 50 bp, Artificial Sequence
  Synthetic oligonucleotide
ggtctgcccttcctcccctgccggggctacaggggtcgaggggctgggcg

SEQ ID NO: 1426 - DNA, 50 bp, Artificial Sequence
  Synthetic oligonucleotide
aggctgctcgggggtcagacctggcgctggcgtttctttctgctcttccg

SEQ ID NO: 1427 - DNA, 50 bp, Artificial Sequence
  Synthetic oligonucleotide
cgcacccaaaattgcccccaaaggagggttcagtgcacggcgctctggac

SEQ ID NO: 1428 - DNA, 50 bp, Artificial Sequence
  Synthetic oligonucleotide
cgggagaaattctgagcagagccgttagctgctctaacgttagagcgtta

SEQ ID NO: 1429 - DNA, 50 bp, Artificial Sequence
  Synthetic oligonucleotide
cgcctatctgtttggaatttcgcaaataaggaacgtttaaatgacgtagt

SEQ ID NO: 1430 - DNA, 50 bp, Artificial Sequence
  Synthetic oligonucleotide
gctgaacaacttaactccttgtctcataaaatttaagctgctattgatcg

SEQ ID NO: 1431 - DNA, 50 bp, Artificial Sequence
  Synthetic oligonucleotide
cggcaccagggctggatttatagcaaggagccccgactgtaagaagtaat

SEQ ID NO: 1432 - DNA, 50 bp, Artificial Sequence
  Synthetic oligonucleotide
cgctgcgcatcatcttcgccatcgagagcacgtttgtgggctcctggctg

SEQ ID NO: 1433 - DNA, 50 bp, Artificial Sequence
  Synthetic oligonucleotide
tctaggaagcatcccattagtagcaattaagtcaggcaaaagacagcacg

SEQ ID NO: 1434 - DNA, 50 bp, Artificial Sequence
  Synthetic oligonucleotide
tgagtactcaggttggcgtgggacaggggagccggctcccgggggccacg

SEQ ID NO: 1435 - DNA, 50 bp, Artificial Sequence
  Synthetic oligonucleotide
cactcaggctggcgtggggagggacaccctttgcattcgtaaggacaccg

SEQ ID NO: 1436 - DNA, 50 bp, Artificial Sequence
  Synthetic oligonucleotide
cgtggatgtcttcatctgccagagtcaaagaaaaggtcagtgatactatg

SEQ ID NO: 1437 - DNA, 50 bp, Artificial Sequence
  Synthetic oligonucleotide
ttctaaaatgtgggctttctgtgtacatgggcgcgcattcccaggactcg

SEQ ID NO: 1438 - DNA, 50 bp, Artificial Sequence
  Synthetic oligonucleotide
cggctgtgcttatgtgcgtgtatgagttagcagctgtgcacgtgtttctg

SEQ ID NO: 1439 - DNA, 50 bp, Artificial Sequence
  Synthetic oligonucleotide
cggctccgcgcagcagcatcacccgcaccacctcgctgtggcccatctgg

SEQ ID NO: 1440 - DNA, 50 bp, Artificial Sequence
  Synthetic oligonucleotide
gattattgaataattgcataattccgagcgcgggttgggaggcaatgccg

SEQ ID NO: 1441 - DNA, 50 bp, Artificial Sequence
  Synthetic oligonucleotide
cgggtgcccaccctagaattaaccctaggatggatgcaatcaggattcag

SEQ ID NO: 1442 - DNA, 50 bp, Artificial Sequence
  Synthetic oligonucleotide
cgtagccagcagagacctccgagcaccggcgccctctaaagccgaggtca

SEQ ID NO: 1443 - DNA, 50 bp, Artificial Sequence
  Synthetic oligonucleotide
ttctcccagtgctttgttgacaaatgaacaagatttgacactaactagcg

SEQ ID NO: 1444 - DNA, 50 bp, Artificial Sequence
  Synthetic oligonucleotide
ctacctccagagtgtgccttactccatccagggacatggatgaagatccg

SEQ ID NO: 1445 - DNA, 50 bp, Artificial Sequence
  Synthetic oligonucleotide
tagggagggcttctcacttggctgttacctggaagtccacagtggccccg

SEQ ID NO: 1446 - DNA, 50 bp, Artificial Sequence
  Synthetic oligonucleotide
cggggaactccagaattcgaataccccagccttctgtagttctggccccg

SEQ ID NO: 1447 - DNA, 50 bp, Artificial Sequence
  Synthetic oligonucleotide
cggtgaaatgacttggacatacttgttggttttctgtgttcttacaagat

SEQ ID NO: 1448 - DNA, 50 bp, Artificial Sequence
  Synthetic oligonucleotide
accctaaaccctaaaaacctctgtacctcctgatatgggttgaatattcg

SEQ ID NO: 1449 - DNA, 50 bp, Artificial Sequence
  Synthetic oligonucleotide
ttgtacctgctgactctctctggcaatgtgattatcatgaccattattcg

SEQ ID NO: 1450 - DNA, 50 bp, Artificial Sequence
  Synthetic oligonucleotide
cgtgacaggccgaagaagtcaggctacaaaccggatgacaaccgtaagga

SEQ ID NO: 1451 - DNA, 50 bp, Artificial Sequence
  Synthetic oligonucleotide
cgcggaccccaccgcctcttctgcgcgctaagggtgagcgccaagcaatt

SEQ ID NO: 1452 - DNA, 50 bp, Artificial Sequence
  Synthetic oligonucleotide
tcaccatggcccagaagtaggtggccatctcgtggcggttctgcagcacg

SEQ ID NO: 1453 - DNA, 50 bp, Artificial Sequence
  Synthetic oligonucleotide
attttagtccaacggcctgaggaaacagataccccttgatctggaaaacg

SEQ ID NO: 1454 - DNA, 50 bp, Artificial Sequence
  Synthetic oligonucleotide
cggctacctctaccacacagttgggaagcgcagtcctaaaggagacgcag

SEQ ID NO: 1455 - DNA, 50 bp, Artificial Sequence
  Synthetic oligonucleotide
ttgcggaagggcagtggccaactctgcttccttctggcttcaggcaatcg

SEQ ID NO: 1456 - DNA, 50 bp, Artificial Sequence
  Synthetic oligonucleotide
cggcgcctcactcactcccagagccagaaacctgttctcccgggaatgcc

SEQ ID NO: 1457 - DNA, 50 bp, Artificial Sequence
  Synthetic oligonucleotide
ttccaggattcaagacgcttccttttctctttttttgctttaagcatccg

SEQ ID NO: 1458 - DNA, 50 bp, Artificial Sequence
  Synthetic oligonucleotide
ggatggccgtcagggaattaaatatgaatcttttgtcctgtcccaccacg

SEQ ID NO: 1459 - DNA, 50 bp, Artificial Sequence
  Synthetic oligonucleotide
cgcgagggggagcagtgctcccaacccgcgaccctccgcctcagacatca

SEQ ID NO: 1460 - DNA, 50 bp, Artificial Sequence
  Synthetic oligonucleotide
cgggtgagaaaagctcaggtggggcccgccgggccgaaggaggtaacccg

SEQ ID NO: 1461 - DNA, 50 bp, Artificial Sequence
  Synthetic oligonucleotide
caaacagaggcaggctgcttcctgaggaaccagcccctcggggcttgacg

SEQ ID NO: 1462 - DNA, 50 bp, Artificial Sequence
  Synthetic oligonucleotide
cggacaaagtgcagcgaccacggcccctcaggtcccgccgcctcctcgag

SEQ ID NO: 1463 - DNA, 50 bp, Artificial Sequence
  Synthetic oligonucleotide
cggccacgactccagttactatgatgacaggtcagaccatgagcgagaga

SEQ ID NO: 1464 - DNA, 50 bp, Artificial Sequence
  Synthetic oligonucleotide
ctccaggatgtaattagagctaagaacagccgccatccctcagggttccg

SEQ ID NO: 1465 - DNA, 50 bp, Artificial Sequence
  Synthetic oligonucleotide
cgggcgggacgctcctctggcgctgtagtgctcccaactaccctgcagtt

SEQ ID NO: 1466 - DNA, 50 bp, Artificial Sequence
  Synthetic oligonucleotide
gcgggtgtccgtaacagagggcgggcagagtcgggggtgcggggcctgcg

SEQ ID NO: 1467 - DNA, 50 bp, Artificial Sequence
  Synthetic oligonucleotide
cgcggtctcttgagagccctgcagagccccaggcactttccgcgggacca

SEQ ID NO: 1468 - DNA, 50 bp, Artificial Sequence
  Synthetic oligonucleotide
ttggccgggcgagcaaggctgctgctgccagctgatctgctcgggatccg

SEQ ID NO: 1469 - DNA, 50 bp, Artificial Sequence
  Synthetic oligonucleotide
tctgaggcggagggtcgcgggttgggagcactgctccccctcgcggagcg

SEQ ID NO: 1470 - DNA, 50 bp, Artificial Sequence
  Synthetic oligonucleotide
tggctacttgtcctggcaggcacttcttgattggccggcgtgcttgttcg

SEQ ID NO: 1471 - DNA, 50 bp, Artificial Sequence
  Synthetic oligonucleotide
gaggctctaagggggctgcgcagggcccagacattggggttatggcagcg

SEQ ID NO: 1472 - DNA, 50 bp, Artificial Sequence
  Synthetic oligonucleotide
tactgacaacccgctaatagtcttgggctccaagaagcccggcaaaaccg

SEQ ID NO: 1473 - DNA, 50 bp, Artificial Sequence
  Synthetic oligonucleotide
ggagaccagttcgagcactaacgcgggggcgcgcgagtgtgagggttgcg

SEQ ID NO: 1474 - DNA, 50 bp, Artificial Sequence
  Synthetic oligonucleotide
ccacagttgcaggctctgtggtcagctacggggtgacgagagtggagtcg

SEQ ID NO: 1475 - DNA, 50 bp, Artificial Sequence
  Synthetic oligonucleotide
attggggtgcggggcgtgcgcgccgtagtgctgtgtggcgtggagcggcg

SEQ ID NO: 1476 - DNA, 50 bp, Artificial Sequence
  Synthetic oligonucleotide
cgcgcccggccccacaaatgtaagatttatgcacttctccaagccaagtg

SEQ ID NO: 1477 - DNA, 50 bp, Artificial Sequence
  Synthetic oligonucleotide
cggccccatcactcaatcagccgagcattcgaaaccaggtctgccaggca

SEQ ID NO: 1478 - DNA, 50 bp, Artificial Sequence
  Synthetic oligonucleotide
cgtgagccctgagatcctcaacaccactgggacctactccggaaaggctg

SEQ ID NO: 1479 - DNA, 50 bp, Artificial Sequence
  Synthetic oligonucleotide
cggcacgattctctaagttcggaaaccacgaagcttgcgccttcatgcgt

SEQ ID NO: 1480 - DNA, 50 bp, Artificial Sequence
  Synthetic oligonucleotide
agtgaatggggaggcgggcggagtcgggcccagccaggcaccacctagcg

SEQ ID NO: 1481 - DNA, 50 bp, Artificial Sequence
  Synthetic oligonucleotide
cgccgagtggggcggggcttgctggagcctaaagtccaacccatccaccc

SEQ ID NO: 1482 - DNA, 50 bp, Artificial Sequence
  Synthetic oligonucleotide
agcggcgggggcggctcgctggcgccctggagtccgtggatgaggatgcg

SEQ ID NO: 1483 - DNA, 50 bp, Artificial Sequence
  Synthetic oligonucleotide
actcccgaagctgaattgattttcaaatctggaggcgtctctcggggacg

SEQ ID NO: 1484 - DNA, 50 bp, Artificial Sequence
  Synthetic oligonucleotide
cgcaagtggaaaactatgcgctgtccgatcgcaaccctccaatctgtccc

SEQ ID NO: 1485 - DNA, 50 bp, Artificial Sequence
  Synthetic oligonucleotide
ctccagctctgttgtaattttgtcttcgccagatagattagctggaaccg

SEQ ID NO: 1486 - DNA, 50 bp, Artificial Sequence
  Synthetic oligonucleotide
cgggagcagactcagctgtccccaaacctgaatgcaggtaacaagggcag

SEQ ID NO: 1487 - DNA, 50 bp, Artificial Sequence
  Synthetic oligonucleotide
aaggtccggtggccggagcgtgcgggaagcctgcccagagtccatttccg

SEQ ID NO: 1488 - DNA, 50 bp, Artificial Sequence
  Synthetic oligonucleotide
cgcggctcatctgtcattagcaccggcactaagctcccaccgctcagcga

SEQ ID NO: 1489 - DNA, 50 bp, Artificial Sequence
  Synthetic oligonucleotide
ggctctgaggctggacccgggaacttctgtggctgggagtgttgcactcg

SEQ ID NO: 1490 - DNA, 50 bp, Artificial Sequence
  Synthetic oligonucleotide
gagaaaagtcaagttgcagtcccacacagagcctctgggcgccgccgtcg

SEQ ID NO: 1491 - DNA, 50 bp, Artificial Sequence
  Synthetic oligonucleotide
gaaatctcacggtgacctggcctcaagcgagaaggatacctgggccaccg

SEQ ID NO: 1492 - DNA, 50 bp, Artificial Sequence
  Synthetic oligonucleotide
cgcgagagatggagctgcccacggtgttggtgacgcccacggtgagagcg

SEQ ID NO: 1493 - DNA, 50 bp, Artificial Sequence
  Synthetic oligonucleotide
ctccattcgtagctttaatgctaagacgttcattaggcgttgctctcacg

SEQ ID NO: 1494 - DNA, 50 bp, Artificial Sequence
  Synthetic oligonucleotide
cgcctcgcccacttcccagtagacacagggacagcggcttccactcccgg

SEQ ID NO: 1495 - DNA, 50 bp, Artificial Sequence
  Synthetic oligonucleotide
cggggctcttcccaagccacaagtagacttggcaaactttttgtcctaaa

SEQ ID NO: 1496 - DNA, 50 bp, Artificial Sequence
  Synthetic oligonucleotide
catgagcttgggtctctcggaggagcaggagacgcgggctcgaagccgcg

SEQ ID NO: 1497 - DNA, 50 bp, Artificial Sequence
  Synthetic oligonucleotide
cggccaggtcataaacccgtcaggccgccgggctccggatttgcagcctg

SEQ ID NO: 1498 - DNA, 50 bp, Artificial Sequence
  Synthetic oligonucleotide
cgccgaaaatttattgacgcggcgaggccaggctaacaacactgcaatcc

SEQ ID NO: 1499 - DNA, 50 bp, Artificial Sequence
  Synthetic oligonucleotide
tttggagacttaacaccggccgcgttgtgtgcggaggtggtgtagggccg

SEQ ID NO: 1500 - DNA, 50 bp, Artificial Sequence
  Synthetic oligonucleotide
cgccggtgtttgggaatcccagcggggtccccagcttgccgatctcccag

SEQ ID NO: 1501 - DNA, 50 bp, Artificial Sequence
  Synthetic oligonucleotide
cgcctggggacaccgctcaaatcctaacccttggccgcccgtcggctcct

SEQ ID NO: 1502 - DNA, 50 bp, Artificial Sequence
  Synthetic oligonucleotide
cccaggtcgctgtttcgcgctctgtaggggattggaccaggaaagtagcg

SEQ ID NO: 1503 - DNA, 50 bp, Artificial Sequence
  Synthetic oligonucleotide
agtcggtgggccagtgcagttatcctagcaagagcgggcagaggatgccg

SEQ ID NO: 1504 - DNA, 50 bp, Artificial Sequence
  Synthetic oligonucleotide
gcttttacccaggtaactagtttacttggagctggtgtacttggtgaccg

SEQ ID NO: 1505 - DNA, 50 bp, Artificial Sequence
  Synthetic oligonucleotide
cgagcggaggacgctgtgtgtgcataaatttcagcaacgctgaatacagg

SEQ ID NO: 1506 - DNA, 50 bp, Artificial Sequence
  Synthetic oligonucleotide
cgagtttctaaattgcacagactgctctgggccggggcagacaccgcggc

SEQ ID NO: 1507 - DNA, 50 bp, Artificial Sequence
  Synthetic oligonucleotide
cgctaccgctaccgcttctgctctcggttatggcaaaagagccaccatca

SEQ ID NO: 1508 - DNA, 50 bp, Artificial Sequence
  Synthetic oligonucleotide
ggcgtcgcggatgcgcctcaaattcagtgcaaaaacgtgctgaagatccg

SEQ ID NO: 1509 - DNA, 50 bp, Artificial Sequence
  Synthetic oligonucleotide
gtgggatgtgtgagccggatgccctctccttccggtgtggcgaggacgcg

SEQ ID NO: 1510 - DNA, 50 bp, Artificial Sequence
  Synthetic oligonucleotide
ccccgggcacaggagccagctcggctcacggtggggtctgcttggaggcg

SEQ ID NO: 1511 - DNA, 50 bp, Artificial Sequence
  Synthetic oligonucleotide
cgaccttgaagaagatacacgggctatgacttcgctgttgtcaccgagcg

SEQ ID NO: 1512 - DNA, 50 bp, Artificial Sequence
  Synthetic oligonucleotide
ccaactgggggcggtaggggcggtagttactcggaaatccatgtattccg

SEQ ID NO: 1513 - DNA, 50 bp, Artificial Sequence
  Synthetic oligonucleotide
cgcaaaacttgtcgctgcccaatagcacggcccaagcactcttggccgcc

SEQ ID NO: 1514 - DNA, 50 bp, Artificial Sequence
  Synthetic oligonucleotide
cgctttcattttcagagctgcctgtggccttacgcaggttcagaaaatcg

SEQ ID NO: 1515 - DNA, 50 bp, Artificial Sequence
  Synthetic oligonucleotide
cgcggcttggtcttcacaggcgcagattgggggcctgtttcatttttcgt

SEQ ID NO: 1516 - DNA, 50 bp, Artificial Sequence
  Synthetic oligonucleotide
ccgctggagaagcgggcgcgacagggcgatgagttaacgcggagggagcg

SEQ ID NO: 1517 - DNA, 50 bp, Artificial Sequence
  Synthetic oligonucleotide
cgtgcctacaagaattcagacgttagggaattcaagaccatgccttagac

SEQ ID NO: 1518 - DNA, 50 bp, Artificial Sequence
  Synthetic oligonucleotide
cggccgagtcataggcctgatcatattaacgccctaggtcagagggagag

SEQ ID NO: 1519 - DNA, 50 bp, Artificial Sequence
  Synthetic oligonucleotide
cgccttcagctcccacccgcagcagcaaccgcagcctgcttccggggact

SEQ ID NO: 1520 - DNA, 50 bp, Artificial Sequence
  Synthetic oligonucleotide
cggttggtaaaccgcttagctgtgagcccgacccagggcctgattcgaaa

SEQ ID NO: 1521 - DNA, 50 bp, Artificial Sequence
  Synthetic oligonucleotide
atgctcctgagcgggatgagggaatcccagggcacagaggtatctctgcg

SEQ ID NO: 1522 - DNA, 50 bp, Artificial Sequence
  Synthetic oligonucleotide
ctgtccaggtgtcttcgttacacatgtgccttcctagtctggagtccacg

SEQ ID NO: 1523 - DNA, 50 bp, Artificial Sequence
  Synthetic oligonucleotide
tgtctccacacacagctgggctgtggtagggggtgtctcaggccacaccg

SEQ ID NO: 1524 - DNA, 50 bp, Artificial Sequence
  Synthetic oligonucleotide
ggctccaacacggagtgcgcgtgcgctcaaggaccagctggctaggagcg

SEQ ID NO: 1525 - DNA, 50 bp, Artificial Sequence
  Synthetic oligonucleotide
cgcggccaaggacaaggccccgcccgggtccataaccattgtccccagct

SEQ ID NO: 1526 - DNA, 50 bp, Artificial Sequence
  Synthetic oligonucleotide
gaatctgccccttagcccgtattgcaggggcggtgcagttggggattccg

SEQ ID NO: 1527 - DNA, 50 bp, Artificial Sequence
  Synthetic oligonucleotide
cgcaggtggaatggtctgcaaacagatgaattcagcccctccaaaccaag

SEQ ID NO: 1528 - DNA, 50 bp, Artificial Sequence
  Synthetic oligonucleotide
tgcaagatgagtcgatcagtgacgcgtggggtggcattgttcgctcgacg

SEQ ID NO: 1529 - DNA, 50 bp, Artificial Sequence
  Synthetic oligonucleotide
cgcgcaacaaaaccattggctgaagagtccaacgatgtgattggtgaatt

SEQ ID NO: 1530 - DNA, 50 bp, Artificial Sequence
  Synthetic oligonucleotide
cgccggctccgcggtctacacccacccactccttggatgatctcacccgg

SEQ ID NO: 1531 - DNA, 50 bp, Artificial Sequence
  Synthetic oligonucleotide
cgctcagaatttgagtgacagaacttgccaccacacagtgcacttaatga

SEQ ID NO: 1532 - DNA, 50 bp, Artificial Sequence
  Synthetic oligonucleotide
aataaggcctcggaacccaccagttcagccctgggcgggagtcggcaacg

SEQ ID NO: 1533 - DNA, 50 bp, Artificial Sequence
  Synthetic oligonucleotide
tatgggaggtggtctctggcagtactctctgagtgctgcctcccgagacg

SEQ ID NO: 1534 - DNA, 50 bp, Artificial Sequence
  Synthetic oligonucleotide
ggcgttgatattttcttttccacacttagtcttcaaggaggcttgtggcg

SEQ ID NO: 1535 - DNA, 50 bp, Artificial Sequence
  Synthetic oligonucleotide
cgggagggggacgcagcctaaagacctcgtactcttgcttcttgtttcta

SEQ ID NO: 1536 - DNA, 50 bp, Artificial Sequence
  Synthetic oligonucleotide
agtggcctgcacaggggaactgggtagcgagagagttccaggcaattccg

SEQ ID NO: 1537 - DNA, 50 bp, Artificial Sequence
  Synthetic oligonucleotide
cgcacagcgccacaggcattcagggtgtttattgcgcttggggccagggt

SEQ ID NO: 1538 - DNA, 50 bp, Artificial Sequence
  Synthetic oligonucleotide
ccaccggcggtctgaagatttggcagccagcagtctccagaggggggtcg

SEQ ID NO: 1539 - DNA, 50 bp, Artificial Sequence
  Synthetic oligonucleotide
gtaataataggtacccctttccagaagagggttcaagatcttccagaacg

SEQ ID NO: 1540 - DNA, 50 bp, Artificial Sequence
  Synthetic oligonucleotide
tggcacgggtcatcgtggacaagtaccgtgatggcaccaagatggtgtcg

SEQ ID NO: 1541 - DNA, 50 bp, Artificial Sequence
  Synthetic oligonucleotide
cgcgggcttagcagacccgcccattggctcttgcatctcctgcgtgggat

SEQ ID NO: 1542 - DNA, 50 bp, Artificial Sequence
  Synthetic oligonucleotide
cggctaagtgcccctctcgtatcaggtggccggacacatgaacgggaagg

SEQ ID NO: 1543 - DNA, 50 bp, Artificial Sequence
  Synthetic oligonucleotide
cgcggcctctagaatattgtagaatcttcccaagagcccccgcgggaagg

SEQ ID NO: 1544 - DNA, 50 bp, Artificial Sequence
  Synthetic oligonucleotide
cgcagtgcctccgcgaaactgacaactcctccgggcggtgaccggctcca

SEQ ID NO: 1545 - DNA, 50 bp, Artificial Sequence
  Synthetic oligonucleotide
gccagggccggctgtggtcaggcgggctattttctggcaagtgtggcgcg

SEQ ID NO: 1546 - DNA, 50 bp, Artificial Sequence
  Synthetic oligonucleotide
cgccgccgccaccagcgttgtgaacctctgaccctcgcggctctgcgtcc

SEQ ID NO: 1547 - DNA, 50 bp, Artificial Sequence
  Synthetic oligonucleotide
cgacccgctagcctaggccgagacacagtctgtattctgaaagccgccag

SEQ ID NO: 1548 - DNA, 50 bp, Artificial Sequence
  Synthetic oligonucleotide
cgcgccgttgtctaaaaaagtctgaactccaccttagtgttaactagtcc

SEQ ID NO: 1549 - DNA, 50 bp, Artificial Sequence
  Synthetic oligonucleotide
gtcacggccgctgacaaatagttccctttgcttcctgatttggaactgcg

SEQ ID NO: 1550 - DNA, 50 bp, Artificial Sequence
  Synthetic oligonucleotide
cggatgaagcccaaggaaccacagggagataatttggtttggacagggct

SEQ ID NO: 1551 - DNA, 50 bp, Artificial Sequence
  Synthetic oligonucleotide
cgttaacactgagccatgaagccagggcttgtgtcctcagagaatgcata

SEQ ID NO: 1552 - DNA, 50 bp, Artificial Sequence
  Synthetic oligonucleotide
cgccccgccgaagcccaggctttcagtccaagcagggatggtccggagta

SEQ ID NO: 1553 - DNA, 50 bp, Artificial Sequence
  Synthetic oligonucleotide
taaataaatgtcaaacacacacaaaatccactctgaggcgggtgctgacg

SEQ ID NO: 1554 - DNA, 50 bp, Artificial Sequence
  Synthetic oligonucleotide
ccttgcttgctggggactggggccgcgagggcatacccccgaggggtacg

SEQ ID NO: 1555 - DNA, 50 bp, Artificial Sequence
  Synthetic oligonucleotide
ggcctgtgggcgcggcgcaaagcccggactggattccagaggggcaggcg

SEQ ID NO: 1556 - DNA, 50 bp, Artificial Sequence
  Synthetic oligonucleotide
agaaacctacaaaaaattaaatttgccctgtaaaacactagtctgaatcg

SEQ ID NO: 1557 - DNA, 50 bp, Artificial Sequence
  Synthetic oligonucleotide
aatcttggaaaacagaaacaccccgaaaaattgcaagttgtttccgctcg

SEQ ID NO: 1558 - DNA, 50 bp, Artificial Sequence
  Synthetic oligonucleotide
aaacaatgcttatctcaagctgactcaaaactggctcttgagaaaatccg

SEQ ID NO: 1559 - DNA, 50 bp, Artificial Sequence
  Synthetic oligonucleotide
cgcgcacctccgccagcagtcctacgacgtgaccgacgagctgccactgc

SEQ ID NO: 1560 - DNA, 50 bp, Artificial Sequence
  Synthetic oligonucleotide
cgggagttttcagtcaagaagcgataatgcgctttggctatttggggttt

SEQ ID NO: 1561 - DNA, 50 bp, Artificial Sequence
  Synthetic oligonucleotide
atgcacagcgatgggggaatggaccatcttggagaggctgctagaagccg

SEQ ID NO: 1562 - DNA, 50 bp, Artificial Sequence
  Synthetic oligonucleotide
tgtctgggttaatgttttataagggactggctactctcgtctacctgccg

SEQ ID NO: 1563 - DNA, 50 bp, Artificial Sequence
  Synthetic oligonucleotide
gcagcgcgcggcgcggagaggcgaggaccggtatctggagactggggacg

SEQ ID NO: 1564 - DNA, 50 bp, Artificial Sequence
  Synthetic oligonucleotide
aggggcgcgaaggcaggcgcggccagggagtgagcggggcgctgggcgcg

SEQ ID NO: 1565 - DNA, 50 bp, Artificial Sequence
  Synthetic oligonucleotide
gatcgcattctgggtgcctgagggccagaggctaggttttaaggccaccg

SEQ ID NO: 1566 - DNA, 50 bp, Artificial Sequence
  Synthetic oligonucleotide
ccgggcaggagatctgggctgcgggcgccaggcagagctggcatcttccg

SEQ ID NO: 1567 - DNA, 50 bp, Artificial Sequence
  Synthetic oligonucleotide
taatttgtatggaaccacgaaaaaccccaaatagccaaagcgcattatcg

SEQ ID NO: 1568 - DNA, 50 bp, Artificial Sequence
  Synthetic oligonucleotide
ggggcttggcacacagtaggtctaaggcaccgaggcaggagcgtcccccg

SEQ ID NO: 1569 - DNA, 50 bp, Artificial Sequence
  Synthetic oligonucleotide
cgctgactgtgaataagtgtgtcagttcttaaggtccagcaacacaaagc

SEQ ID NO: 1570 - DNA, 50 bp, Artificial Sequence
  Synthetic oligonucleotide
ggtcagtcctgtagtgcgtaacggaactcggttccggctggctctgatcg

SEQ ID NO: 1571 - DNA, 50 bp, Artificial Sequence
  Synthetic oligonucleotide
cgcccaatgtttttgcaaactcttgcagctgggggaaggcagtggatact

SEQ ID NO: 1572 - DNA, 50 bp, Artificial Sequence
  Synthetic oligonucleotide
cggttgggtttatagagttgtgatcaccaaagcctgcatttaaaatagac

SEQ ID NO: 1573 - DNA, 50 bp, Artificial Sequence
  Synthetic oligonucleotide
aacggcttaagtcaattataaccttcctttcagaaccatcttgtgggacg

SEQ ID NO: 1574 - DNA, 50 bp, Artificial Sequence
  Synthetic oligonucleotide
tgaggggacaatagctggtcttacaaaggcaccacctgtgatttagcacg

SEQ ID NO: 1575 - DNA, 50 bp, Artificial Sequence
  Synthetic oligonucleotide
ataaccgtctctctctcaaaacgttctttattaaaaggcactggcggccg

SEQ ID NO: 1576 - DNA, 50 bp, Artificial Sequence
  Synthetic oligonucleotide
cgccccagcccagtgccccccgaagggccaaatgccaagtccactgaggc

SEQ ID NO: 1577 - DNA, 50 bp, Artificial Sequence
  Synthetic oligonucleotide
ggagccgcccgtttgcctggagagcagcaaggacaaagcaatgggctccg

SEQ ID NO: 1578 - DNA, 50 bp, Artificial Sequence
  Synthetic oligonucleotide
ccatgccatgagagagaacctggcagtgtcagattcactccagcgggtcg

SEQ ID NO: 1579 - DNA, 50 bp, Artificial Sequence
  Synthetic oligonucleotide
ctcagagaataccttccttccggcaggagaccgtttggccctgtattccg

SEQ ID NO: 1580 - DNA, 50 bp, Artificial Sequence
  Synthetic oligonucleotide
cgagactaagaagtgacccaacctaggtgacccttcagctaggtcactct

SEQ ID NO: 1581 - DNA, 50 bp, Artificial Sequence
  Synthetic oligonucleotide
cggtttctcattggttcttttagtgtctgaatatatgataggccatttct

SEQ ID NO: 1582 - DNA, 50 bp, Artificial Sequence
  Synthetic oligonucleotide
gtcccttccctggctcagggctggctggaaagacagagacgtttcatgcg

SEQ ID NO: 1583 - DNA, 50 bp, Artificial Sequence
  Synthetic oligonucleotide
cgcggtcctggcgcccccacacccgcgaccccgcgaggcccccacctcct

SEQ ID NO: 1584 - DNA, 50 bp, Artificial Sequence
  Synthetic oligonucleotide
agattcgcttttctaactacggaagtaaggctctgggcagctgagctccg

SEQ ID NO: 1585 - DNA, 50 bp, Artificial Sequence
  Synthetic oligonucleotide
cgctggagacaagccccagcagagcgaaatatcctgaagtagctttcttt

SEQ ID NO: 1586 - DNA, 50 bp, Artificial Sequence
  Synthetic oligonucleotide
ctagggcagcctcagttggcagcccagagctgtgaccgggtgttggagcg

SEQ ID NO: 1587 - DNA, 50 bp, Artificial Sequence
  Synthetic oligonucleotide
cgcccttgactgaggagtgtttttaataatcatctggccgacttggaagc

SEQ ID NO: 1588 - DNA, 50 bp, Artificial Sequence
  Synthetic oligonucleotide
cgctcccaccgctacgcggggccgcctggctcctggttctcatcgttctt

SEQ ID NO: 1589 - DNA, 50 bp, Artificial Sequence
  Synthetic oligonucleotide
tgtattcttactcctttatcttgttgcaatgcctgatccagctaagtccg

SEQ ID NO: 1590 - DNA, 50 bp, Artificial Sequence
  Synthetic oligonucleotide
cgcgcgagccgctctttgtggcagagcatcctcttttgaaaccagaattc

SEQ ID NO: 1591 - DNA, 50 bp, Artificial Sequence
  Synthetic oligonucleotide
aactgtttgttcagttgtgaccattgcttgaaacccattcctatggcacg

SEQ ID NO: 1592 - DNA, 50 bp, Artificial Sequence
  Synthetic oligonucleotide
gggtttgcgtgcgggccgggtgcctgggggccccgggctgagggtgagcg

SEQ ID NO: 1593 - DNA, 50 bp, Artificial Sequence
  Synthetic oligonucleotide
ttggagatctcggagttgtgcatcttggggttctgctgcgccatctggcg

SEQ ID NO: 1594 - DNA, 50 bp, Artificial Sequence
  Synthetic oligonucleotide
cgctgcaaataacccccaccacaagcactgccgggagcccagaatagcct

SEQ ID NO: 1595 - DNA, 50 bp, Artificial Sequence
  Synthetic oligonucleotide
cggccatttcaaagagctgctccagccgttcccgttcgtggttggtgtca

SEQ ID NO: 1596 - DNA, 50 bp, Artificial Sequence
  Synthetic oligonucleotide
tcaccacacaattgggctttttacctctctttaaacagaatgaaatgccg

SEQ ID NO: 1597 - DNA, 50 bp, Artificial Sequence
  Synthetic oligonucleotide
cggatgcccccaggctgtgtgaagaaaattcagggcaggctgcgagtctg

SEQ ID NO: 1598 - DNA, 50 bp, Artificial Sequence
  Synthetic oligonucleotide
ttaataacataccaattttgccacccttggcatagggagctagcagatcg

SEQ ID NO: 1599 - DNA, 50 bp, Artificial Sequence
  Synthetic oligonucleotide
cgggcgaccgcaagcagatctacaacatcctgagcacgctggggctgcga

SEQ ID NO: 1600 - DNA, 50 bp, Artificial Sequence
  Synthetic oligonucleotide
cggtgctcagtgttgccttgtgctgtccaatataatagccattcgccacg

SEQ ID NO: 1601 - DNA, 50 bp, Artificial Sequence
  Synthetic oligonucleotide
cgggctccaggaccgtcccctgtgcgccctcatctgcaccgtcgccgtcc

SEQ ID NO: 1602 - DNA, 50 bp, Artificial Sequence
  Synthetic oligonucleotide
gaagtcgtcgccggcctggcggagggtcaggtggaccacaggtggcaccg

SEQ ID NO: 1603 - DNA, 50 bp, Artificial Sequence
  Synthetic oligonucleotide
tcttggagggtgtcggggttttcctttctttttcatttgaattttatccg

SEQ ID NO: 1604 - DNA, 50 bp, Artificial Sequence
  Synthetic oligonucleotide
agccctggaggaatttcccttttgaaatcttgcggtgttgagtaggaccg

SEQ ID NO: 1605 - DNA, 50 bp, Artificial Sequence
  Synthetic oligonucleotide
cggcgttccagctctcaaccttgctcccagcagcccccgccggcgcactc

SEQ ID NO: 1606 - DNA, 50 bp, Artificial Sequence
  Synthetic oligonucleotide
tctaatgagagatgacggccaggtgttctcagcagcccctggccctcacg

SEQ ID NO: 1607 - DNA, 50 bp, Artificial Sequence
  Synthetic oligonucleotide
cggagatgtcctccagaaagcagcagagccatggaacggggtttgagcac

SEQ ID NO: 1608 - DNA, 50 bp, Artificial Sequence
  Synthetic oligonucleotide
tggagtttggtgcggtcccggtgcccagggggcgccttttccgcatgccg

SEQ ID NO: 1609 - DNA, 50 bp, Artificial Sequence
  Synthetic oligonucleotide
gcattacagggttcctggtgtgttcctctaaccacttagttgggaaatcg

SEQ ID NO: 1610 - DNA, 50 bp, Artificial Sequence
  Synthetic oligonucleotide
cgcgaatggcggttacaagtgcagctagtataaaaagctgagataagggt

SEQ ID NO: 1611 - DNA, 50 bp, Artificial Sequence
  Synthetic oligonucleotide
taaatgctttccaataaagcatgtccagcgctcgggctttagtttgcacg

SEQ ID NO: 1612 - DNA, 50 bp, Artificial Sequence
  Synthetic oligonucleotide
cgggtcactcaactaagagtagcgtccaaaggcaggatgcggtaacacct

SEQ ID NO: 1613 - DNA, 50 bp, Artificial Sequence
  Synthetic oligonucleotide
tcagaggagtatcagagccagcgctgtgtgtgcagggctgggcctttccg

SEQ ID NO: 1614 - DNA, 50 bp, Artificial Sequence
  Synthetic oligonucleotide
cggcctcgtaaagctcccagctggcccggaccccgagctcctcccggtta

SEQ ID NO: 1615 - DNA, 50 bp, Artificial Sequence
  Synthetic oligonucleotide
aaatctaagtaagctggtccactgatgaaaaacctccttccttgcatgcg

SEQ ID NO: 1616 - DNA, 50 bp, Artificial Sequence
  Synthetic oligonucleotide
cgccgcggaactcacagaggttcccccgccatagcctcccgcgtgcgctc

SEQ ID NO: 1617 - DNA, 50 bp, Artificial Sequence
  Synthetic oligonucleotide
tccagtcccgagcatttcggatgaatgaatgatgaacaaacgacagaacg

SEQ ID NO: 1618 - DNA, 50 bp, Artificial Sequence
  Synthetic oligonucleotide
cgcagcagcctgagacgctgccagctcttcaaacgttacccgagggcccg

SEQ ID NO: 1619 - DNA, 50 bp, Artificial Sequence
  Synthetic oligonucleotide
ctgtcgggtgcaggtggacgtcccctcacggtaaggtcagagtgctcccg

SEQ ID NO: 1620 - DNA, 50 bp, Artificial Sequence
  Synthetic oligonucleotide
gcttgcgaagtccggcttctctgaggccccgtagctggcgcgagttgtcg

SEQ ID NO: 1621 - DNA, 50 bp, Artificial Sequence
  Synthetic oligonucleotide
gggcagtggcagctcgtcggtcacgtcgtaggactgctggcggaggtgcg

SEQ ID NO: 1622 - DNA, 50 bp, Artificial Sequence
  Synthetic oligonucleotide
cgccctgcggggagtcgccttcgtttagtcccaggtttctccggcgcttt

SEQ ID NO: 1623 - DNA, 50 bp, Artificial Sequence
  Synthetic oligonucleotide
ggagcctcgcagagttttaaagatgcagagctcctttttcggaggccacg

SEQ ID NO: 1624 - DNA, 50 bp, Artificial Sequence
  Synthetic oligonucleotide
aagtgctgatagtgggcctcacagaaaagttaccatgaaccgactttccg

SEQ ID NO: 1625 - DNA, 50 bp, Artificial Sequence
  Synthetic oligonucleotide
gagagaacggaggtgcggatgcggcgcaagcagaggcgcaggcgaaggcg

SEQ ID NO: 1626 - DNA, 50 bp, Artificial Sequence
  Synthetic oligonucleotide
aagtccttcatcaccaggagtgtctgcttaagtctattccaagttgaacg

SEQ ID NO: 1627 - DNA, 50 bp, Artificial Sequence
  Synthetic oligonucleotide
cgagggcactaaggccgtcaccaagtacaccagctccaaataaatggacg

SEQ ID NO: 1628 - DNA, 50 bp, Artificial Sequence
  Synthetic oligonucleotide
cgtgaagtgggtgcttcagctgtcccccagctttaggattttaacccagc

SEQ ID NO: 1629 - DNA, 50 bp, Artificial Sequence
  Synthetic oligonucleotide
cgcggagtggacgcagccacgtctgcaactcacccggacacacacaaaaa

SEQ ID NO: 1630 - DNA, 50 bp, Artificial Sequence
  Synthetic oligonucleotide
atgcgctccggaaccgtaatgcgcgctttttctaagccttacggtaaacg

SEQ ID NO: 1631 - DNA, 50 bp, Artificial Sequence
  Synthetic oligonucleotide
gcacatgcggatgcggagagaggcccatggcgagttcggcggcgtggccg

SEQ ID NO: 1632 - DNA, 50 bp, Artificial Sequence
  Synthetic oligonucleotide
cggggcctcccaggccactccttctaggacaagtagggtctgggcactgt

SEQ ID NO: 1633 - DNA, 50 bp, Artificial Sequence
  Synthetic oligonucleotide
gcgaaccaggttgggcggggcctgggcggggctctcagatagcgaaggcg

SEQ ID NO: 1634 - DNA, 50 bp, Artificial Sequence
  Synthetic oligonucleotide
ctgtccaagcctggaaggggtcatttattccatgcagaaggaactgggcg

SEQ ID NO: 1635 - DNA, 50 bp, Artificial Sequence
  Synthetic oligonucleotide
cgcctcagacgagggcgggctgtgtggggcgggagtaccagaaagggtcg

SEQ ID NO: 1636 - DNA, 50 bp, Artificial Sequence
  Synthetic oligonucleotide
cgggacctcccaagtaagggacaaacgcgcttctccagaagaggcgtgtc

SEQ ID NO: 1637 - DNA, 50 bp, Artificial Sequence
  Synthetic oligonucleotide
cgcgcaggctgcagccctcctaccccggaccttcgcaaaccccggggctg

SEQ ID NO: 1638 - DNA, 50 bp, Artificial Sequence
  Synthetic oligonucleotide
cgcatggaatctggtgtttattacactcgggggagagaggaggtcactcg

SEQ ID NO: 1639 - DNA, 50 bp, Artificial Sequence
  Synthetic oligonucleotide
gcagcggcgggctaagcttccctttcccactttgttctgggaggcagtcg

SEQ ID NO: 1640 - DNA, 50 bp, Artificial Sequence
  Synthetic oligonucleotide
agctgggggctctgcgagggggcggggctcagacacgggtggggtcaccg

SEQ ID NO: 1641 - DNA, 50 bp, Artificial Sequence
  Synthetic oligonucleotide
cgcagtaaccggatgactcctacgggtcacctcgcaagccccgccccctc

SEQ ID NO: 1642 - DNA, 50 bp, Artificial Sequence
  Synthetic oligonucleotide
cgcgaggcagcgcctctacccgctacccccaagcctgggcgcaccccctc

SEQ ID NO: 1643 - DNA, 50 bp, Artificial Sequence
  Synthetic oligonucleotide
cgaacctcagttgagaaacaacagaagctgagacaattttacgcaggtga

SEQ ID NO: 1644 - DNA, 50 bp, Artificial Sequence
  Synthetic oligonucleotide
cgccagcatccgtcaggaggatgcctttgataacaaaattgacattgctg

SEQ ID NO: 1645 - DNA, 50 bp, Artificial Sequence
  Synthetic oligonucleotide
aactggaagctatgtcgccccttctttcagggcccaattaattcgccgcg

SEQ ID NO: 1646 - DNA, 50 bp, Artificial Sequence
  Synthetic oligonucleotide
ctgcgccgcgtccatgtaggagtggctgaggcccgggtggtgcgtgtccg

SEQ ID NO: 1647 - DNA, 50 bp, Artificial Sequence
  Synthetic oligonucleotide
cgccacaccggaaggagagggcatccggctcacacatcccaccctatgtc

SEQ ID NO: 1648 - DNA, 50 bp, Artificial Sequence
  Synthetic oligonucleotide
ggcctgggtgcccaaagtggcagtgtgggcctctgtgggatggagaggcg

SEQ ID NO: 1649 - DNA, 50 bp, Artificial Sequence
  Synthetic oligonucleotide
actgcttttctgtaaatgacagaaatactaagagaacttgacggaaatcg

SEQ ID NO: 1650 - DNA, 50 bp, Artificial Sequence
  Synthetic oligonucleotide
gtctgcatgtgtctccttagccttaacccccttgcctaggacagaaagcg

SEQ ID NO: 1651 - DNA, 50 bp, Artificial Sequence
  Synthetic oligonucleotide
ctgaaccaccagtgatgaattgctgctcaccagtgatgagttgaataccg

SEQ ID NO: 1652 - DNA, 50 bp, Artificial Sequence
  Synthetic oligonucleotide
gcacgtcgggaacccgcgagttaatagaggtgaccgaggacgtggacccg

SEQ ID NO: 1653 - DNA, 50 bp, Artificial Sequence
  Synthetic oligonucleotide
gctgacttgatgcggccaggtttctgggaccaggaggttgggacacgacg

SEQ ID NO: 1654 - DNA, 50 bp, Artificial Sequence
  Synthetic oligonucleotide
cggacaccgagtcggatttctatgaagaaatcgaggtgagctgcaccccg

SEQ ID NO: 1655 - DNA, 50 bp, Artificial Sequence
  Synthetic oligonucleotide
agcagcagcgtggccagcacgtagcccagctgctggaagaagtgggctcg

SEQ ID NO: 1656 - DNA, 50 bp, Artificial Sequence
  Synthetic oligonucleotide
agcttgcgaatcagtagctcagtcgatttctgatagcggcggatttcacg

SEQ ID NO: 1657 - DNA, 50 bp, Artificial Sequence
  Synthetic oligonucleotide
cgggcctctaaaacatgagctctgccttctgggatcagtgcacatagacc

SEQ ID NO: 1658 - DNA, 50 bp, Artificial Sequence
  Synthetic oligonucleotide
gcgggctggcctttctgctgctggtaggaggatcatgtgctgctatttcg

SEQ ID NO: 1659 - DNA, 50 bp, Artificial Sequence
  Synthetic oligonucleotide
cgcttgttttagaatctgtgccctgcattgctgtaagcagctcacaaaca

SEQ ID NO: 1660 - DNA, 50 bp, Artificial Sequence
  Synthetic oligonucleotide
cgggcagaggaacaggaggagaaactgccgacaatccctcatttccaatg

SEQ ID NO: 1661 - DNA, 50 bp, Artificial Sequence
  Synthetic oligonucleotide
cgccgctgctaaatatatccgtaggaatggagagggaccggatctcaggt

SEQ ID NO: 1662 - DNA, 50 bp, Artificial Sequence
  Synthetic oligonucleotide
gggtgcattccatactgagagccatggctcatgagggacaggtcatggcg

SEQ ID NO: 1663 - DNA, 50 bp, Artificial Sequence
  Synthetic oligonucleotide
cggattattgcctctaaaaggctggcctggcaccctgcctggcagcatct

SEQ ID NO: 1664 - DNA, 50 bp, Artificial Sequence
  Synthetic oligonucleotide
cgtgacgtcccgcagaggcctcggaattactcagcattcacatgccgttt

SEQ ID NO: 1665 - DNA, 50 bp, Artificial Sequence
  Synthetic oligonucleotide
cgcccagccccatggtcctggagagtcccccgctccagccctggaccctc

SEQ ID NO: 1666 - DNA, 50 bp, Artificial Sequence
  Synthetic oligonucleotide
tctgtcacccaggcatcaggatttttcaaaattacccctctgttgagccg

SEQ ID NO: 1667 - DNA, 50 bp, Artificial Sequence
  Synthetic oligonucleotide
cggccatgactagattttcaaaggctattggtatcaggagtgtcttatga

SEQ ID NO: 1668 - DNA, 50 bp, Artificial Sequence
  Synthetic oligonucleotide
cgctgcgtgggagttcccatcccgcggtcccaggacccccggcagcagct

SEQ ID NO: 1669 - DNA, 50 bp, Artificial Sequence
  Synthetic oligonucleotide
ggagctctgacctgccctggcttggctgtgcctgggtttgggacagttcg

SEQ ID NO: 1670 - DNA, 50 bp, Artificial Sequence
  Synthetic oligonucleotide
aattcacctgaggcacttgttaaacccaactttcccaggctcctcgttcg

SEQ ID NO: 1671 - DNA, 50 bp, Artificial Sequence
  Synthetic oligonucleotide
ctgggctggctctcactgggtttattggagcacctaggcttagaacctcg

SEQ ID NO: 1672 - DNA, 50 bp, Artificial Sequence
  Synthetic oligonucleotide
ccatttgcttattctcactattgttttaatttattgtgcagcctgttgcg

SEQ ID NO: 1673 - DNA, 50 bp, Artificial Sequence
  Synthetic oligonucleotide
ttgctgaaccctgcggggggcccggctgagtttgttcatttatggaaacg

SEQ ID NO: 1674 - DNA, 50 bp, Artificial Sequence
  Synthetic oligonucleotide
tgtaactgcgcatttttctagaccagtctttattattccagcaatcagcg

SEQ ID NO: 1675 - DNA, 50 bp, Artificial Sequence
  Synthetic oligonucleotide
gaaactgcagcgtttcggcctcacagatggggctggagttggagacgtcg

SEQ ID NO: 1676 - DNA, 50 bp, Artificial Sequence
  Synthetic oligonucleotide
gaaggtcctctgcaccagaaaggctgcccatggcacaaaccctgatctcg

SEQ ID NO: 1677 - DNA, 50 bp, Artificial Sequence
  Synthetic oligonucleotide
cgcagaccacagaatccaagagtgctaggaatcagaggagagagaggaag

SEQ ID NO: 1678 - DNA, 50 bp, Artificial Sequence
  Synthetic oligonucleotide
cgcattttgtcggaataaaccaacacacggaggttgggtaatctagcccc

SEQ ID NO: 1679 - DNA, 50 bp, Artificial Sequence
  Synthetic oligonucleotide
agcaaagttcctttctaaataccccatattgaataaacactgtttaaacg

SEQ ID NO: 1680 - DNA, 50 bp, Artificial Sequence
  Synthetic oligonucleotide
atctccaatgcaaacccagtgtgtgggtggctggaaaacacactactacg

SEQ ID NO: 1681 - DNA, 50 bp, Artificial Sequence
  Synthetic oligonucleotide
ggtttcacattccattgaagtcccactggcagatgcctttggtaagctcg

SEQ ID NO: 1682 - DNA, 50 bp, Artificial Sequence
  Synthetic oligonucleotide
aaaaaggtttacatgaccactaacgctaacggagcacttagtacttgccg

SEQ ID NO: 1683 - DNA, 50 bp, Artificial Sequence
  Synthetic oligonucleotide
aacagagccagcatcttgccagggccccggaggaggggttccccgctacg

SEQ ID NO: 1684 - DNA, 50 bp, Artificial Sequence
  Synthetic oligonucleotide
ttttcagcagaacagacgcagcccccgagtcagtgccgtcagaagacacg

SEQ ID NO: 1685 - DNA, 50 bp, Artificial Sequence
  Synthetic oligonucleotide
tatgttgctggtgcggcggctccgcggcgttgctggcggcggggggagcg

SEQ ID NO: 1686 - DNA, 50 bp, Artificial Sequence
  Synthetic oligonucleotide
cgccacccagagactgaaattatagataattcctggctgttttccactct

SEQ ID NO: 1687 - DNA, 50 bp, Artificial Sequence
  Synthetic oligonucleotide
tattgataaggacatttcatacctaacaagggccaggtgacatttcctcg

SEQ ID NO: 1688 - DNA, 50 bp, Artificial Sequence
  Synthetic oligonucleotide
tgaccagaactgcttttattgacaccccctttcctaaacatagcttttcg

SEQ ID NO: 1689 - DNA, 50 bp, Artificial Sequence
  Synthetic oligonucleotide
cgccccgccagcctctccgccgctgggctccaccctcccgggctctgctg

SEQ ID NO: 1690 - DNA, 50 bp, Artificial Sequence
  Synthetic oligonucleotide
tatcgacgggtaaaaagtgttgtcctttaaaaagtgccccactaacttcg

SEQ ID NO: 1691 - DNA, 50 bp, Artificial Sequence
  Synthetic oligonucleotide
cgcgctggaggtgagactaacctctagtcccccgtcgaagccagagagca

SEQ ID NO: 1692 - DNA, 50 bp, Artificial Sequence
  Synthetic oligonucleotide
cctgccacatgcagatcacttgggccagcggaagtgcccctggctgcccg

SEQ ID NO: 1693 - DNA, 50 bp, Artificial Sequence
  Synthetic oligonucleotide
cccttgcagcagcgcttttccgggcggggggcatccggtggagggctgcg

SEQ ID NO: 1694 - DNA, 50 bp, Artificial Sequence
  Synthetic oligonucleotide
gctgggtgggaagcagacgcggtacggtgggcagaggtccccagcctgcg

SEQ ID NO: 1695 - DNA, 50 bp, Artificial Sequence
  Synthetic oligonucleotide
cgccttgtttggattagccctccagatctgccaacctgatcaactcctga

SEQ ID NO: 1696 - DNA, 50 bp, Artificial Sequence
  Synthetic oligonucleotide
cgcgccccagaagctctcagatacccccacgatttcggtgaccttccgca

SEQ ID NO: 1697 - DNA, 50 bp, Artificial Sequence
  Synthetic oligonucleotide
gggcgggaagccgggcgcctccttatttctttacgggggcgctggctacg

SEQ ID NO: 1698 - DNA, 50 bp, Artificial Sequence
  Synthetic oligonucleotide
cgcccactggcttgctggttaggctgtgatcgcgatcgctttgacttctc

SEQ ID NO: 1699 - DNA, 50 bp, Artificial Sequence
  Synthetic oligonucleotide
tggccgcggtgagagcggggccccagggctgcgcgaggtggggcgatgcg

SEQ ID NO: 1700 - DNA, 50 bp, Artificial Sequence
  Synthetic oligonucleotide
ggatcgaggcccagaaaacggagcagcgggcaccagggaggcctggaacg

SEQ ID NO: 1701 - DNA, 50 bp, Artificial Sequence
  Synthetic oligonucleotide
ggcttcacccttgagactgtgttgcccattgctcggccatcggtctctcg

SEQ ID NO: 1702 - DNA, 50 bp, Artificial Sequence
  Synthetic oligonucleotide
gggagattcgggctggaacagcggtaatgggcacaattaccctaatgacg

SEQ ID NO: 1703 - DNA, 50 bp, Artificial Sequence
  Synthetic oligonucleotide
tttctcagcctggcttttatttacactcttattaaggaggctttcattcg

SEQ ID NO: 1704 - DNA, 50 bp, Artificial Sequence
  Synthetic oligonucleotide
gtggcagtgccacctgggcccggactctgggactgcgggaggcgggagcg

SEQ ID NO: 1705 - DNA, 50 bp, Artificial Sequence
  Synthetic oligonucleotide
agttcccccttttgttccaagtcccggagcagacaaagaggcggcgagcg

SEQ ID NO: 1706 - DNA, 50 bp, Artificial Sequence
  Synthetic oligonucleotide
cgaagtcagggaataagaaatctccagttcagatctcacagctttgaaag

SEQ ID NO: 1707 - DNA, 50 bp, Artificial Sequence
  Synthetic oligonucleotide
cgccaggctcctgaccccagcttggacagcaggccgccgagcgcccctga

SEQ ID NO: 1708 - DNA, 50 bp, Artificial Sequence
  Synthetic oligonucleotide
cgctcccgcctacccgcagccaggaaaccccgactccgctgactgggatg

SEQ ID NO: 1709 - DNA, 50 bp, Artificial Sequence
  Synthetic oligonucleotide
cttggtggagcgaagttgctctcccgggcttacctgaactgcctgcgccg

SEQ ID NO: 1710 - DNA, 50 bp, Artificial Sequence
  Synthetic oligonucleotide
cggtgtctccacttcactcaggtatagtgttccctggaaccgggaggctg

SEQ ID NO: 1711 - DNA, 50 bp, Artificial Sequence
  Synthetic oligonucleotide
cgagccttccgcggcttggttggggcttctcggtcttaacgtggttaccg

SEQ ID NO: 1712 - DNA, 50 bp, Artificial Sequence
  Synthetic oligonucleotide
aaatcctgacatagatttcaacacaccttatgattaccagagcacagacg

SEQ ID NO: 1713 - DNA, 50 bp, Artificial Sequence
  Synthetic oligonucleotide
atgccataaaacaacaagccggtccctgggagcaagtaaaaatttattcg

SEQ ID NO: 1714 - DNA, 50 bp, Artificial Sequence
  Synthetic oligonucleotide
acaccacgtttccagcttggagtgggccttgagccttgggactgacctcg

SEQ ID NO: 1715 - DNA, 50 bp, Artificial Sequence
  Synthetic oligonucleotide
cgggtgccgcagtaacggctgctgctcggccaggcggtaactgatgggcg

SEQ ID NO: 1716 - DNA, 50 bp, Artificial Sequence
  Synthetic oligonucleotide
atcctgagatgaggtgggttggcgactaaggcgcaccggtgggcactgcg

SEQ ID NO: 1717 - DNA, 50 bp, Artificial Sequence
  Synthetic oligonucleotide
cctgggcagtgagcctgtttatagacacccttctcccttccttggtgtcg

SEQ ID NO: 1718 - DNA, 50 bp, Artificial Sequence
  Synthetic oligonucleotide
cggggggtttccagcccgcctcgggcaggaaaccaggacctccctgcacc

SEQ ID NO: 1719 - DNA, 50 bp, Artificial Sequence
  Synthetic oligonucleotide
cgccacctgaccgggcctggcgcccccaatgtggtgcagtggcccagcaa

SEQ ID NO: 1720 - DNA, 50 bp, Artificial Sequence
  Synthetic oligonucleotide
tgccccctaaactgttgcaagtcatagcccaaactctgtaagctaaatcg

SEQ ID NO: 1721 - DNA, 50 bp, Artificial Sequence
  Synthetic oligonucleotide
gtccccttgcgagggcactaggacaacaggaggggcgcacctgcaatacg

SEQ ID NO: 1722 - DNA, 50 bp, Artificial Sequence
  Synthetic oligonucleotide
cgccctttctgccgacctcacgggctatttaaaggtacgcgccgcggcca

SEQ ID NO: 1723 - DNA, 50 bp, Artificial Sequence
  Synthetic oligonucleotide
cgccccgccctcgccacccagcctccctggcggcctcaggtcgcgcctgc

SEQ ID NO: 1724 - DNA, 50 bp, Artificial Sequence
  Synthetic oligonucleotide
acatgatgccctagtgcagctgctatgtgcatttgccagacatttccacg

SEQ ID NO: 1725 - DNA, 50 bp, Artificial Sequence
  Synthetic oligonucleotide
tctgtccaggatacagcctgcagccaggatcgtccctctcagagtcctcg

SEQ ID NO: 1726 - DNA, 50 bp, Artificial Sequence
  Synthetic oligonucleotide
cgaggccagtgcgcgggcaggagcggggacgtgctcagaagagccgggcg

SEQ ID NO: 1727 - DNA, 50 bp, Artificial Sequence
  Synthetic oligonucleotide
tttgacagcgctgccagattcgggaatgaggatcactgcggcgaggcccg

SEQ ID NO: 1728 - DNA, 50 bp, Artificial Sequence
  Synthetic oligonucleotide
gccggctcacgctcagcaggtgggcctgcgggtggatggccaggtgcacg

SEQ ID NO: 1729 - DNA, 50 bp, Artificial Sequence
  Synthetic oligonucleotide
cggcccggcgggccccacctgagcttttctcacccgctcaaagccgctac

SEQ ID NO: 1730 - DNA, 50 bp, Artificial Sequence
  Synthetic oligonucleotide
cggagtgacgtgaggtgagatttacaggctgttcagtacatatcacaagt

SEQ ID NO: 1731 - DNA, 50 bp, Artificial Sequence
  Synthetic oligonucleotide
cgtcttcactcagggctttggggatcccctcgtcgccccaggtcagtggg

SEQ ID NO: 1732 - DNA, 50 bp, Artificial Sequence
  Synthetic oligonucleotide
cggccaatacctcggcttgcacaaagctgcctgtcagctttcctaagaca

SEQ ID NO: 1733 - DNA, 50 bp, Artificial Sequence
  Synthetic oligonucleotide
cgggagtttgtagtattcataaccgttgaggactctctgaccccagctcg

SEQ ID NO: 1734 - DNA, 50 bp, Artificial Sequence
  Synthetic oligonucleotide
cgggcctatcattggcttaggttttaggaaggtcccaagctcatttgcca

SEQ ID NO: 1735 - DNA, 50 bp, Artificial Sequence
  Synthetic oligonucleotide
gcgagcgcagatttgccccaccccagagcccaggcgggtgtggagaaccg

SEQ ID NO: 1736 - DNA, 50 bp, Artificial Sequence
  Synthetic oligonucleotide
caatcgtctggcagagttggccagcagagatcagccggcgtgagtcagcg

SEQ ID NO: 1737 - DNA, 50 bp, Artificial Sequence
  Synthetic oligonucleotide
cgggtctgcaccaacctcagtttcggggctgcggctcacagaagtctaac

SEQ ID NO: 1738 - DNA, 50 bp, Artificial Sequence
  Synthetic oligonucleotide
cggggaacatcagcacccacggagacacctgcgccagggagacacctctg

SEQ ID NO: 1739 - DNA, 50 bp, Artificial Sequence
  Synthetic oligonucleotide
caagccgaaaaccaggagactcttgcagtcagggggcaactggggaagcg

SEQ ID NO: 1740 - DNA, 50 bp, Artificial Sequence
  Synthetic oligonucleotide
tgaggcctgacgtccagcaacaggtggaatgccccagaatccagcagtcg

SEQ ID NO: 1741 - DNA, 50 bp, Artificial Sequence
  Synthetic oligonucleotide
gacaggtcctggttgcaagtttctccataagggttgctctgtgatgttcg

SEQ ID NO: 1742 - DNA, 50 bp, Artificial Sequence
  Synthetic oligonucleotide
gacctagatgtgagccacaccttcacaagccatgccatgttcagagagcg

SEQ ID NO: 1743 - DNA, 50 bp, Artificial Sequence
  Synthetic oligonucleotide
cgggacagggaaaatgaaagactttggaagtcgtcaggaatttgactctg

SEQ ID NO: 1744 - DNA, 50 bp, Artificial Sequence
  Synthetic oligonucleotide
cgctccaatttgagatcccaaaatgagatgctgcccgggaccagaagtca

SEQ ID NO: 1745 - DNA, 50 bp, Artificial Sequence
  Synthetic oligonucleotide
cgccaccctccaaaggcgctgttcctgagagccggtgcctgcctgcccac

SEQ ID NO: 1746 - DNA, 50 bp, Artificial Sequence
  Synthetic oligonucleotide
tgtcagcttttgcaattattggaatgatgttcacctgtaaaacagacacg

SEQ ID NO: 1747 - DNA, 50 bp, Artificial Sequence
  Synthetic oligonucleotide
cgggaagttacttagcacggttccgggtttctcgcgccccgcctgtcccc

SEQ ID NO: 1748 - DNA, 50 bp, Artificial Sequence
  Synthetic oligonucleotide
cgagacctgcggttgctttggtttgccttttactaagttcatttctcagc

SEQ ID NO: 1749 - DNA, 50 bp, Artificial Sequence
  Synthetic oligonucleotide
cgtcctgacacagcctttgtcaacactggcactcacagcggccgtcgcgt

SEQ ID NO: 1750 - DNA, 50 bp, Artificial Sequence
  Synthetic oligonucleotide
acagggtggcgcaggctgttttctggacattctgcccctcacagaaagcg

SEQ ID NO: 1751 - DNA, 50 bp, Artificial Sequence
  Synthetic oligonucleotide
cggcgatccgctctctgcgccctgggaaaaagccccagccatgagcaatc

SEQ ID NO: 1752 - DNA, 50 bp, Artificial Sequence
  Synthetic oligonucleotide
cgtttcatcggtagtaccttgccccagtcgctggctgccctttgccctgt

SEQ ID NO: 1753 - DNA, 50 bp, Artificial Sequence
  Synthetic oligonucleotide
ccgtttcaaaactgttctagcaagcactgaaggaatgcatagggtcaccg

SEQ ID NO: 1754 - DNA, 50 bp, Artificial Sequence
  Synthetic oligonucleotide
cccctgcttaatttcctgggtgttcgtattttaggctctttgcttcctcg

SEQ ID NO: 1755 - DNA, 50 bp, Artificial Sequence
  Synthetic oligonucleotide
ttttcctagtaatttattcttcaaggcccatcaatgtagttataaaaacg

SEQ ID NO: 1756 - DNA, 50 bp, Artificial Sequence
  Synthetic oligonucleotide
agctctgcatctccaacctggaacccaacccagaagtctcaagtttgacg

SEQ ID NO: 1757 - DNA, 50 bp, Artificial Sequence
  Synthetic oligonucleotide
cgtcagagccagggcccccagttgtggaagtttctatatccggtaaattg

SEQ ID NO: 1758 - DNA, 50 bp, Artificial Sequence
  Synthetic oligonucleotide
ttcccgggcttcagcacaggtgacttggctgaggtaggtggtggctgacg

SEQ ID NO: 1759 - DNA, 50 bp, Artificial Sequence
  Synthetic oligonucleotide
tggagtctctctcctccacgtgctgagaggcgccctctgattggctctcg

SEQ ID NO: 1760 - DNA, 50 bp, Artificial Sequence
  Synthetic oligonucleotide
cgctgcggcccccgctaccgacaccgtctcgaccccgcgcattctatccg

SEQ ID NO: 1761 - DNA, 50 bp, Artificial Sequence
  Synthetic oligonucleotide
cgcacgtcgctcccgctgcagccaggccgctcccctgggactctggtcca

SEQ ID NO: 1762 - DNA, 50 bp, Artificial Sequence
  Synthetic oligonucleotide
cggcggcagccctttaaacccctcacccagccagcgccccatcctgtctg

SEQ ID NO: 1763 - DNA, 50 bp, Artificial Sequence
  Synthetic oligonucleotide
ctccttcccgcgggggctcttgggaagattctacaatattctagaggccg

SEQ ID NO: 1764 - DNA, 50 bp, Artificial Sequence
  Synthetic oligonucleotide
cttcttcaaagcccaagaccggtgatgcagaatggactctgccagcttcg

SEQ ID NO: 1765 - DNA, 50 bp, Artificial Sequence
  Synthetic oligonucleotide
ccaggactacggagctgtcttcctctgtgaccacaggtgcgtgcagtccg

SEQ ID NO: 1766 - DNA, 50 bp, Artificial Sequence
  Synthetic oligonucleotide
cgggcgtggtcagcactgctttggggctaagcagagtttcaacatgtttc

SEQ ID NO: 1767 - DNA, 50 bp, Artificial Sequence
  Synthetic oligonucleotide
cggcactgcccagggtacacacacctcaccgaccacgcacgccgggcagg

SEQ ID NO: 1768 - DNA, 50 bp, Artificial Sequence
  Synthetic oligonucleotide
cccgaggtggcagtgggctcctggtacagcggatgcgagtccgcactccg

SEQ ID NO: 1769 - DNA, 50 bp, Artificial Sequence
  Synthetic oligonucleotide
ggcagcgctcgctggacagtgaggaactcgcggagaagatgcgcttgccg

SEQ ID NO: 1770 - DNA, 50 bp, Artificial Sequence
  Synthetic oligonucleotide
cgcacccggccagaaccctggttctttaggacagtgacagcccagagtag

SEQ ID NO: 1771 - DNA, 50 bp, Artificial Sequence
  Synthetic oligonucleotide
cgggatgactgcaaagcatttgtatggatggccatctccaatcatcccta

SEQ ID NO: 1772 - DNA, 50 bp, Artificial Sequence
  Synthetic oligonucleotide
cgcgccgccagcatcagcaccagccctgacatcaccgcccgccgcccgct

SEQ ID NO: 1773 - DNA, 50 bp, Artificial Sequence
  Synthetic oligonucleotide
cgcggcgctagacaacctgcgcaaggtggtgccttgctattctaagacgc

SEQ ID NO: 1774 - DNA, 50 bp, Artificial Sequence
  Synthetic oligonucleotide
cgccctacagcccgcacagcccgcacggccctggtatggtggctctgctt

SEQ ID NO: 1775 - DNA, 50 bp, Artificial Sequence
  Synthetic oligonucleotide
cgcactgacagtgtcatttcaccagacacccaagacttcttggaagcgag

SEQ ID NO: 1776 - DNA, 50 bp, Artificial Sequence
  Synthetic oligonucleotide
gcatcgggtctgtccgcagccggcagcggtgcagagcggtggggagagcg

SEQ ID NO: 1777 - DNA, 50 bp, Artificial Sequence
  Synthetic oligonucleotide
cagttacaagaagccgagaggtcttcttgtcataaaattaacttccctcg

SEQ ID NO: 1778 - DNA, 50 bp, Artificial Sequence
  Synthetic oligonucleotide
cagagggaagccggggggtctgtgctgggatctgaaggtttgcagcctcg

SEQ ID NO: 1779 - DNA, 50 bp, Artificial Sequence
  Synthetic oligonucleotide
cgcccccggctctgggcgccccgcagagcatcctactccgcggttgcctc

SEQ ID NO: 1780 - DNA, 50 bp, Artificial Sequence
  Synthetic oligonucleotide
cggccgctagggaagacttggccaccctctggaagtaccttcccccggga

SEQ ID NO: 1781 - DNA, 50 bp, Artificial Sequence
  Synthetic oligonucleotide
tttccgcccgtgttgcaaatgcccgtggttgggttgggggcgggacagcg

SEQ ID NO: 1782 - DNA, 50 bp, Artificial Sequence
  Synthetic oligonucleotide
taccgtctatcatttcgaggtctgcgactactaaaacggtcagagtatcg

SEQ ID NO: 1783 - DNA, 50 bp, Artificial Sequence
  Synthetic oligonucleotide
cgcccggcacctgatccctgcagggcccccagggtggagcagcagccgtc

SEQ ID NO: 1784 - DNA, 50 bp, Artificial Sequence
  Synthetic oligonucleotide
cgcgctggcaagtttgtggaacactttctaggaattaggtcttttcctcc

SEQ ID NO: 1785 - DNA, 50 bp, Artificial Sequence
  Synthetic oligonucleotide
cgccgccaacggcatcatccccccgaggcccgcctacgaggtcttcggtt

SEQ ID NO: 1786 - DNA, 50 bp, Artificial Sequence
  Synthetic oligonucleotide
cggtgtccccgatcgcgctgaaccacttcccaaagcctgcgccctcgccc

SEQ ID NO: 1787 - DNA, 50 bp, Artificial Sequence
  Synthetic oligonucleotide
cgggatgatactctttctggccaacatcgtcctgtcaccatagccagctt

SEQ ID NO: 1788 - DNA, 50 bp, Artificial Sequence
  Synthetic oligonucleotide
tggtgcatgaaagcaaaaccagagaggcgccttttccaaatgccaatgcg

SEQ ID NO: 1789 - DNA, 50 bp, Artificial Sequence
  Synthetic oligonucleotide
gctgggcaggagctgaattcccgggagcttgcctgtgtagacccagtgcg

SEQ ID NO: 1790 - DNA, 50 bp, Artificial Sequence
  Synthetic oligonucleotide
aaagggcttggcctggcggccggctggactgcagatgtctcttccaggcg

SEQ ID NO: 1791 - DNA, 50 bp, Artificial Sequence
  Synthetic oligonucleotide
gctgtgcgtttgacaggcagttgggagaccctggtggccggttttggtcg

SEQ ID NO: 1792 - DNA, 50 bp, Artificial Sequence
  Synthetic oligonucleotide
gggcgacacgagggcagacggtgtagccgaatcgtagccagagctgggcg

SEQ ID NO: 1793 - DNA, 50 bp, Artificial Sequence
  Synthetic oligonucleotide
cattagcagcggtggcacgggctggcggaggaggctcctttgtaaatacg

SEQ ID NO: 1794 - DNA, 50 bp, Artificial Sequence
  Synthetic oligonucleotide
cggcactcaactgaaggctgatatcaggcgattagacagccatgcattct

SEQ ID NO: 1795 - DNA, 50 bp, Artificial Sequence
  Synthetic oligonucleotide
tctctttagtcaccactctcgccctctccaagaatttgtttaacaaagcg

SEQ ID NO: 1796 - DNA, 50 bp, Artificial Sequence
  Synthetic oligonucleotide
actaacttaaccctgtgtgcgcctgacactccctagagaagctgggatcg

SEQ ID NO: 1797 - DNA, 50 bp, Artificial Sequence
  Synthetic oligonucleotide
aggctctggggtctccgcggaaaatgcccaagtgctaccgccagggagcg

SEQ ID NO: 1798 - DNA, 50 bp, Artificial Sequence
  Synthetic oligonucleotide
cggcctaccccagccaccccatgccctacagctccgtgttgactcagaac

SEQ ID NO: 1799 - DNA, 50 bp, Artificial Sequence
  Synthetic oligonucleotide
cgtggtgttttaccggggtatactcatgaacaacaaataaccaccggttt

SEQ ID NO: 1800 - DNA, 50 bp, Artificial Sequence
  Synthetic oligonucleotide
tctggttcaggaacttgggacccttcattatcccaaacgtttgagcttcg

SEQ ID NO: 1801 - DNA, 50 bp, Artificial Sequence
  Synthetic oligonucleotide
cggcactgtggagagaggacttggaaaataactaagttggtttaaattgc

SEQ ID NO: 1802 - DNA, 50 bp, Artificial Sequence
  Synthetic oligonucleotide
cggggcgcctcctccacgcaggcctccggcttcctccaggcgaccaggcc

SEQ ID NO: 1803 - DNA, 50 bp, Artificial Sequence
  Synthetic oligonucleotide
cgcctcaacccagcaaggctcaggactcttccatgcgtgggcacacgaag

SEQ ID NO: 1804 - DNA, 50 bp, Artificial Sequence
  Synthetic oligonucleotide
cgcccggcccagagcattctttataaggccgaatagtttgcatttgaagg

SEQ ID NO: 1805 - DNA, 50 bp, Artificial Sequence
  Synthetic oligonucleotide
gctcagttccccctctctgctcatggttacctagtgtggtcctcagctcg

SEQ ID NO: 1806 - DNA, 50 bp, Artificial Sequence
  Synthetic oligonucleotide
cgtctgggatgaatgatcttgccctaacttgtgtccctatcaactagttt

SEQ ID NO: 1807 - DNA, 50 bp, Artificial Sequence
  Synthetic oligonucleotide
cgggactatgcaagcaaggagggagaggagccatttgcaggtttcacaca

SEQ ID NO: 1808 - DNA, 50 bp, Artificial Sequence
  Synthetic oligonucleotide
ccctgaaaatcaaatggcagaacctaaacggaagactcactgccaaaacg

SEQ ID NO: 1809 - DNA, 50 bp, Artificial Sequence
  Synthetic oligonucleotide
cggccccgacgccctccagggctgagtacctacactcacacacacggcgg

SEQ ID NO: 1810 - DNA, 50 bp, Artificial Sequence
  Synthetic oligonucleotide
cttagcttcttgaggcccctggtcaggggatgcagaccctggagccctcg

SEQ ID NO: 1811 - DNA, 50 bp, Artificial Sequence
  Synthetic oligonucleotide
cggttgcttttcaaatacagcttttctaaaacgccgccaggcacccgggc

SEQ ID NO: 1812 - DNA, 50 bp, Artificial Sequence
  Synthetic oligonucleotide
cgctcctctaggctcacatgacccagacccacagggcaaaaagtgcgtcg

SEQ ID NO: 1813 - DNA, 50 bp, Artificial Sequence
  Synthetic oligonucleotide
cttcatactcccagacccagacagagaagtttcccgagtcatccacatcg

SEQ ID NO: 1814 - DNA, 50 bp, Artificial Sequence
  Synthetic oligonucleotide
ttgctcatcccagtgcaagatctgtttatgttcctctccttggctgtacg

SEQ ID NO: 1815 - DNA, 50 bp, Artificial Sequence
  Synthetic oligonucleotide
cctctgagcaagttgatggctatctcaaaacctcgaaacctgtctctacg

SEQ ID NO: 1816 - DNA, 50 bp, Artificial Sequence
  Synthetic oligonucleotide
cgtccacgcagcccttgccacggtagtccgggtacacgtactcctcgggt

SEQ ID NO: 1817 - DNA, 50 bp, Artificial Sequence
  Synthetic oligonucleotide
tgctctcaccaggctgcgcgctggcgggtcggtgcacagggacggggtcg

SEQ ID NO: 1818 - DNA, 50 bp, Artificial Sequence
  Synthetic oligonucleotide
cggggccctgcacctgtgcagcgaagcttagcgttcatccgtgtaacccg

SEQ ID NO: 1819 - DNA, 50 bp, Artificial Sequence
  Synthetic oligonucleotide
catttagttccatcgaaagggaatgtaacaatataactcaccacttcccg

SEQ ID NO: 1820 - DNA, 50 bp, Artificial Sequence
  Synthetic oligonucleotide
cgggagcccagcctttcccagatagcacgctccgccagtcccaagggtgc

SEQ ID NO: 1821 - DNA, 50 bp, Artificial Sequence
  Synthetic oligonucleotide
cggaccattgtggcttgcacaaaacccgcgccccaagagcctctgccagg

SEQ ID NO: 1822 - DNA, 50 bp, Artificial Sequence
  Synthetic oligonucleotide
cgtccaccacgaccatttctcccgggaagtcgttgcgcaccgagaagagg

SEQ ID NO: 1823 - DNA, 50 bp, Artificial Sequence
  Synthetic oligonucleotide
ggctctatctccttgtggtcatcatagcccatttggccctggtcaagtcg

SEQ ID NO: 1824 - DNA, 50 bp, Artificial Sequence
  Synthetic oligonucleotide
gtgtgcgtggggggtatgcagcatccagttacattcctgacccactttcg

SEQ ID NO: 1825 - DNA, 50 bp, Artificial Sequence
  Synthetic oligonucleotide
cgacaagaaagatactgaatatcgccctccgaaaatcgggcgcatttgaa

SEQ ID NO: 1826 - DNA, 50 bp, Artificial Sequence
  Synthetic oligonucleotide
cgggtggaggattatcaggtaacacaagaagtgttgcagacctcctgggc

SEQ ID NO: 1827 - DNA, 50 bp, Artificial Sequence
  Synthetic oligonucleotide
accctggggctgcttgcttcttccagcatgggaagcgctgacttgatgcg

SEQ ID NO: 1828 - DNA, 50 bp, Artificial Sequence
  Synthetic oligonucleotide
cggtgattttgagtcacccaagataagacactaacttgaccttaactttg

SEQ ID NO: 1829 - DNA, 50 bp, Artificial Sequence
  Synthetic oligonucleotide
cggcttcagggatgtcgtagagtcttagctacgaatcatccaatacccgc

SEQ ID NO: 1830 - DNA, 50 bp, Artificial Sequence
  Synthetic oligonucleotide
cgcggattgccgagggcttgcaggcactcaggcagacgcagacagaaacc

SEQ ID NO: 1831 - DNA, 50 bp, Artificial Sequence
  Synthetic oligonucleotide
cggggccccctgacccccgcgttcacccctcagcccggccgccgggcact

SEQ ID NO: 1832 - DNA, 50 bp, Artificial Sequence
  Synthetic oligonucleotide
tggaagaaacgtcttcttcctgccaaaacagacacgcactggctgtctcg

SEQ ID NO: 1833 - DNA, 50 bp, Artificial Sequence
  Synthetic oligonucleotide
tccttcagttaaataagaaatcaggtccagagccgagttcaaggcattcg

SEQ ID NO: 1834 - DNA, 50 bp, Artificial Sequence
  Synthetic oligonucleotide
catccagttccctgcctcggagataaagattccagctacatgggcaaacg

SEQ ID NO: 1835 - DNA, 50 bp, Artificial Sequence
  Synthetic oligonucleotide
cgggggaagggcagcaactcggcgcccccctcagcgcctcgcactacctc

SEQ ID NO: 1836 - DNA, 50 bp, Artificial Sequence
  Synthetic oligonucleotide
gggtcccgagtgggacggggggctcggcgggaagtttacctggtgccgcg

SEQ ID NO: 1837 - DNA, 50 bp, Artificial Sequence
  Synthetic oligonucleotide
aatcatctggcttctgcaaagcagtcgcgcagcgctgtagggtgaggccg

SEQ ID NO: 1838 - DNA, 50 bp, Artificial Sequence
  Synthetic oligonucleotide
ttacagactgtcctggcggtgtctgcaagtcggtaaccccccgggtttcg

SEQ ID NO: 1839 - DNA, 50 bp, Artificial Sequence
  Synthetic oligonucleotide
ctgcccttcccgaaaccaacttttcgctgagcgattagagacttcagacg

SEQ ID NO: 1840 - DNA, 50 bp, Artificial Sequence
  Synthetic oligonucleotide
gtccggccggggagggccgagggctctgtttgaggtcaccctggagaccg

SEQ ID NO: 1841 - DNA, 50 bp, Artificial Sequence
  Synthetic oligonucleotide
cggcccatcctggtcatgttactgcatttgtggccggcctcccctggatc

SEQ ID NO: 1842 - DNA, 50 bp, Artificial Sequence
  Synthetic oligonucleotide
cgcgccttcccaggcaggaactttgcgaccccaccccctgggcccgccac

SEQ ID NO: 1843 - DNA, 50 bp, Artificial Sequence
  Synthetic oligonucleotide
caggcgcttcgcaggtgagccgggtgctgccgcctctctgcagagagacg

SEQ ID NO: 1844 - DNA, 50 bp, Artificial Sequence
  Synthetic oligonucleotide
cgcagccagccccaccgcctccggactcgaccccaccatagccccgccgt

SEQ ID NO: 1845 - DNA, 50 bp, Artificial Sequence
  Synthetic oligonucleotide
ctatttataaaggcaaagtccttctgattggtccgaatcttccagtttcg

SEQ ID NO: 1846 - DNA, 50 bp, Artificial Sequence
  Synthetic oligonucleotide
cgggttatctgatggaagtagtatagagtcatcattaaaagtagagactt

SEQ ID NO: 1847 - DNA, 50 bp, Artificial Sequence
  Synthetic oligonucleotide
cgtggctgatcaccccaagagaagtcaaccccaggcgggcggttacgacg

SEQ ID NO: 1848 - DNA, 50 bp, Artificial Sequence
  Synthetic oligonucleotide
gaggtctggctttcggggtgttaggctccagggacctcctgcggagctcg

SEQ ID NO: 1849 - DNA, 50 bp, Artificial Sequence
  Synthetic oligonucleotide
aacatacaggcacaaaagggcacatacacactctcaaaaccagaatgccg

SEQ ID NO: 1850 - DNA, 50 bp, Artificial Sequence
  Synthetic oligonucleotide
cggggccgactcgtgtcactcagccctattggccaatgagcgcctcgccc

SEQ ID NO: 1851 - DNA, 50 bp, Artificial Sequence
  Synthetic oligonucleotide
gcttttccctccgcgatcatggtgaatcagcaaagcgctgcagagcagcg

SEQ ID NO: 1852 - DNA, 50 bp, Artificial Sequence
  Synthetic oligonucleotide
cgccacaaagacgtcagggattagggtcgcaggcgccttgtttaatggcc

SEQ ID NO: 1853 - DNA, 50 bp, Artificial Sequence
  Synthetic oligonucleotide
tggggagtagctaggggcctgcccggcgggggcgcaggaacccggttgcg

SEQ ID NO: 1854 - DNA, 50 bp, Artificial Sequence
  Synthetic oligonucleotide
ccccagcagagcgaaatatcctgaagtagctttctttgccccaatttgcg

SEQ ID NO: 1855 - DNA, 50 bp, Artificial Sequence
  Synthetic oligonucleotide
cgttcgaaacctgtcgccgtcacttgcgcgtttggcattatccattgtca

SEQ ID NO: 1856 - DNA, 50 bp, Artificial Sequence
  Synthetic oligonucleotide
agcccaccggaagcaaaactgagcaagatctgaagtagagagcgatgccg

SEQ ID NO: 1857 - DNA, 50 bp, Artificial Sequence
  Synthetic oligonucleotide
cggctcagccccataaggtagagcagcattttgggacaagtcactgagga

SEQ ID NO: 1858 - DNA, 50 bp, Artificial Sequence
  Synthetic oligonucleotide
cggcgcatgcttgggactgagtctacagaactacttctggaaaaaatcct

SEQ ID NO: 1859 - DNA, 50 bp, Artificial Sequence
  Synthetic oligonucleotide
cggcacttctgtgttcatgtgtgtacaaggtggtatgtagcccacgcatg

SEQ ID NO: 1860 - DNA, 50 bp, Artificial Sequence
  Synthetic oligonucleotide
gagagaaagtttgctagccacgcggcttgctgaagcacgtctgggcttcg

SEQ ID NO: 1861 - DNA, 50 bp, Artificial Sequence
  Synthetic oligonucleotide
ggacaagtggctgtgaaatcgattgtgaagcgtgaccttccatcccagcg

SEQ ID NO: 1862 - DNA, 50 bp, Artificial Sequence
  Synthetic oligonucleotide
ccctcgattaacctgtctttgcctagcgcaaagtctattcaacaactgcg

SEQ ID NO: 1863 - DNA, 50 bp, Artificial Sequence
  Synthetic oligonucleotide
cgagagttcctcagatgaacggtgtccctggggcagtggcgcggagggcg

SEQ ID NO: 1864 - DNA, 50 bp, Artificial Sequence
  Synthetic oligonucleotide
cgctttactcaatgctcagtgagtcatgaggtggctgcccccaggcctcc

SEQ ID NO: 1865 - DNA, 50 bp, Artificial Sequence
  Synthetic oligonucleotide
cgacgaggaaatactaacaagggacagctctgtggtttctgctatcgaaa

SEQ ID NO: 1866 - DNA, 50 bp, Artificial Sequence
  Synthetic oligonucleotide
cgccaagtagcgactctttaagccctgggccaccaaccagcccactcccc

SEQ ID NO: 1867 - DNA, 50 bp, Artificial Sequence
  Synthetic oligonucleotide
cgggatctggcacacgcctaaagccctctcagtgctatctgtattccgtg

SEQ ID NO: 1868 - DNA, 50 bp, Artificial Sequence
  Synthetic oligonucleotide
cgcccggcggcatctcccgtttttttgtggcataacagttgaccaaaata

SEQ ID NO: 1869 - DNA, 50 bp, Artificial Sequence
  Synthetic oligonucleotide
gcaagtgcagaaggtcctagtagccgagcgtggagtcgagctcgtgggcg

SEQ ID NO: 1870 - DNA, 50 bp, Artificial Sequence
  Synthetic oligonucleotide
cgggacctcatgcagcttggcagatatctgagaaatggtttaattcatgc

SEQ ID NO: 1871 - DNA, 50 bp, Artificial Sequence
  Synthetic oligonucleotide
gccggcctggcggagggtcaggtggaccacaggtggcaccgggctgagcg

SEQ ID NO: 1872 - DNA, 50 bp, Artificial Sequence
  Synthetic oligonucleotide
cgggcttcccaatcactagaccctggctactgccacctgcttcaccctcc

SEQ ID NO: 1873 - DNA, 50 bp, Artificial Sequence
  Synthetic oligonucleotide
agtgagagagccggataagtaccattgctgcttgattgctgtccaagtcg

SEQ ID NO: 1874 - DNA, 50 bp, Artificial Sequence
  Synthetic oligonucleotide
ttcgcggaggggcggggctgtgggggctgtcttcctgtgttttctctccg

SEQ ID NO: 1875 - DNA, 50 bp, Artificial Sequence
  Synthetic oligonucleotide
gtccatctacagtttcgacgagaccaaagacttggatctggaagacatcg

SEQ ID NO: 1876 - DNA, 50 bp, Artificial Sequence
  Synthetic oligonucleotide
ggctttccgccttaggtcaacgttgtagaaaagcaagtgaaggtttcacg

SEQ ID NO: 1877 - DNA, 50 bp, Artificial Sequence
  Synthetic oligonucleotide
gggaggctgcggtgctggagcgaggatgcgcagaccgaggcagggaggcg

SEQ ID NO: 1878 - DNA, 50 bp, Artificial Sequence
  Synthetic oligonucleotide
cggcaagtgacatgacatcattcataaagaaatgggtataaacaggattg

SEQ ID NO: 1879 - DNA, 50 bp, Artificial Sequence
  Synthetic oligonucleotide
cggttgcacctctggggtggaacatctataaaatttagataatgataccc

SEQ ID NO: 1880 - DNA, 50 bp, Artificial Sequence
  Synthetic oligonucleotide
cgggatcccagttcgtttaattgcaccgcttagtttacatttcaatggct

SEQ ID NO: 1881 - DNA, 50 bp, Artificial Sequence
  Synthetic oligonucleotide
ctctgaagtttgggctcattgccagtttaagtatatgctgccacctttcg

SEQ ID NO: 1882 - DNA, 50 bp, Artificial Sequence
  Synthetic oligonucleotide
cgctcattcacaggactttattcaagaggttcgtccaggagttttgattg

SEQ ID NO: 1883 - DNA, 50 bp, Artificial Sequence
  Synthetic oligonucleotide
cgtacagatcttttccagaataaagcattattcggccaggacgcctcagc

SEQ ID NO: 1884 - DNA, 50 bp, Artificial Sequence
  Synthetic oligonucleotide
cggggcaaaaacttggaacagctaccacaaagcgaacgcctatctgtttg

SEQ ID NO: 1885 - DNA, 50 bp, Artificial Sequence
  Synthetic oligonucleotide
cggcccttcagaagcgccttctttggttaactctacccccaacgagagcc

SEQ ID NO: 1886 - DNA, 50 bp, Artificial Sequence
  Synthetic oligonucleotide
tcggtgaggcgggtgggctggcgggagctcttcccgaagtgcgttctacg

SEQ ID NO: 1887 - DNA, 50 bp, Artificial Sequence
  Synthetic oligonucleotide
aacgaagtatgccatctgtttccgttatcagtttattgctctcacctccg

SEQ ID NO: 1888 - DNA, 50 bp, Artificial Sequence
  Synthetic oligonucleotide
cgggactctgggcctctgctgggaactcacagtcgacaccaggatgccca

SEQ ID NO: 1889 - DNA, 50 bp, Artificial Sequence
  Synthetic oligonucleotide
cgatgatctgatcctgattggtcagaactgttgtaggaaaaacctggttg

SEQ ID NO: 1890 - DNA, 50 bp, Artificial Sequence
  Synthetic oligonucleotide
cgtgactctgaaaaattatagacagtgcaggtctgcaggtgaactgagac

SEQ ID NO: 1891 - DNA, 50 bp, Artificial Sequence
  Synthetic oligonucleotide
cctattttcagtaatctgattaggggtcgatgttggtgggctcggggacg

SEQ ID NO: 1892 - DNA, 50 bp, Artificial Sequence
  Synthetic oligonucleotide
gcccaggttctacagagtccagggatctcctttctgcacccaccgtagcg

SEQ ID NO: 1893 - DNA, 50 bp, Artificial Sequence
  Synthetic oligonucleotide
cgtcacccacacaaacctgaccttcacgtggggcgcgggaccttgcgggg

SEQ ID NO: 1894 - DNA, 50 bp, Artificial Sequence
  Synthetic oligonucleotide
cgaacaaccctgttgaaggagaagttaccttctgtagtgtgctgggaatt

SEQ ID NO: 1895 - DNA, 50 bp, Artificial Sequence
  Synthetic oligonucleotide
cgggttcccatagcagccagacccacaggtcagcctccggggcttcagct

SEQ ID NO: 1896 - DNA, 50 bp, Artificial Sequence
  Synthetic oligonucleotide
aacttctctcttttccttaaccaaacaccaaattccctccaggattgtcg

SEQ ID NO: 1897 - DNA, 50 bp, Artificial Sequence
  Synthetic oligonucleotide
cgggtgaggcatcgctcctgaagaattaatcagaaactcagaaaaattcc

SEQ ID NO: 1898 - DNA, 50 bp, Artificial Sequence
  Synthetic oligonucleotide
cggtgatctaagccctgagcccaggtccctgaaacctcagccccaggcct

SEQ ID NO: 1899 - DNA, 50 bp, Artificial Sequence
  Synthetic oligonucleotide
tgttgagagcagagttcagggctggtgcactctgcggtgctgagtgggcg

SEQ ID NO: 1900 - DNA, 50 bp, Artificial Sequence
  Synthetic oligonucleotide
cctgcggtgccacagggacgaggcctggagagcagtcgctcctagaaccg

SEQ ID NO: 1901 - DNA, 50 bp, Artificial Sequence
  Synthetic oligonucleotide
cggccccagcccatcaatgaatggggctgaatcaacagtgaacaaaaatg

SEQ ID NO: 1902 - DNA, 50 bp, Artificial Sequence
  Synthetic oligonucleotide
cggggtgttcctgctccgtggcctccatcccagccgatcccgctttgcag

SEQ ID NO: 1903 - DNA, 50 bp, Artificial Sequence
  Synthetic oligonucleotide
cgggaaaccacacgtctaaagcgtcccatctgtaaactcttgcttactct

SEQ ID NO: 1904 - DNA, 50 bp, Artificial Sequence
  Synthetic oligonucleotide
cggagtctcagctacgaatcatccaatacccgcaggtcacagagcgacgg

SEQ ID NO: 1905 - DNA, 50 bp, Artificial Sequence
  Synthetic oligonucleotide
acaagattggattcgcccctgccactttaagaactcgtgagtctaccacg

SEQ ID NO: 1906 - DNA, 50 bp, Artificial Sequence
  Synthetic oligonucleotide
cttttgggcgcggctcgggggtggaagccctgggcgacagcacagcttcg

SEQ ID NO: 1907 - DNA, 50 bp, Artificial Sequence
  Synthetic oligonucleotide
gaggcgggttgcgatggcagcgctgggctacagaccccgccttatttgcg

SEQ ID NO: 1908 - DNA, 50 bp, Artificial Sequence
  Synthetic oligonucleotide
aagtgggagcccttcccccatcccgggcgttgttaaaacccagtggggcg

SEQ ID NO: 1909 - DNA, 50 bp, Artificial Sequence
  Synthetic oligonucleotide
agctcacctgagaatctgcacacccagatgcaggtgagcaccgggtctcg

SEQ ID NO: 1910 - DNA, 50 bp, Artificial Sequence
  Synthetic oligonucleotide
gtggcttgaataagtcgttggcgcgatgtgagatagaatcatcatgcccg

SEQ ID NO: 1911 - DNA, 50 bp, Artificial Sequence
  Synthetic oligonucleotide
cgcagttgttctgaggagaaattaggaaaaggtatgcagttacacaatgc

SEQ ID NO: 1912 - DNA, 50 bp, Artificial Sequence
  Synthetic oligonucleotide
cgtggtatctcgcagtttggctgaaacctgaattaaatgcaatgcttttt

SEQ ID NO: 1913 - DNA, 50 bp, Artificial Sequence
  Synthetic oligonucleotide
gcccggactggattccagaggggcaggcgggggtgggggcagcgggcacg

SEQ ID NO: 1914 - DNA, 50 bp, Artificial Sequence
  Synthetic oligonucleotide
cgggtccctctgctaggaccgcgccttcaacgcggaatcgctgacatgag

SEQ ID NO: 1915 - DNA, 50 bp, Artificial Sequence
  Synthetic oligonucleotide
cgtgctgtgaaactggactttgatttaacccctgcgagaggaaattctga

SEQ ID NO: 1916 - DNA, 50 bp, Artificial Sequence
  Synthetic oligonucleotide
cgtcctgcccaactatgtagcgtgcaggcctccatcttccacatgactgc

SEQ ID NO: 1917 - DNA, 50 bp, Artificial Sequence
  Synthetic oligonucleotide
cctccctaaccctggcggagctgatgggtggctgtagcctgattagaccg

SEQ ID NO: 1918 - DNA, 50 bp, Artificial Sequence
  Synthetic oligonucleotide
cgtcgaggtggcagggagttgctgggagagcacagcgcggagagggaccg

SEQ ID NO: 1919 - DNA, 50 bp, Artificial Sequence
  Synthetic oligonucleotide
cgcaccggccctcccccaatcagccccagcaagaggaagttcagcatgga

SEQ ID NO: 1920 - DNA, 50 bp, Artificial Sequence
  Synthetic oligonucleotide
tgacccggaggacgcgcctacggaagagacgtctggtcgagggggtgccg

SEQ ID NO: 1921 - DNA, 50 bp, Artificial Sequence
  Synthetic oligonucleotide
gatggtgaggactacaaaggtctccccacctcccgggggccgcggaggcg

SEQ ID NO: 1922 - DNA, 50 bp, Artificial Sequence
  Synthetic oligonucleotide
cgcaggcgctctagaaaggcgtgatggccccagctcagtgcccgccagcc

SEQ ID NO: 1923 - DNA, 50 bp, Artificial Sequence
  Synthetic oligonucleotide
cttgaacatgaccctgcgaggcgggccgggagggggcgtggcatgctgcg

SEQ ID NO: 1924 - DNA, 50 bp, Artificial Sequence
  Synthetic oligonucleotide
tcaaaagctctgtcacatcgcgctggcaagacgcttaatcaaagtgagcg

SEQ ID NO: 1925 - DNA, 50 bp, Artificial Sequence
  Synthetic oligonucleotide
cggagctctacatcagagggcatttaattggccttgaaattttcgatcga

SEQ ID NO: 1926 - DNA, 50 bp, Artificial Sequence
  Synthetic oligonucleotide
cgcccgctgctcactacacttgttaccgcttgtcctgagcgcggagaggg

SEQ ID NO: 1927 - DNA, 50 bp, Artificial Sequence
  Synthetic oligonucleotide
cggagcctgcctcagccgcaggctccataaacccagccaggaaccaagcg

SEQ ID NO: 1928 - DNA, 50 bp, Artificial Sequence
  Synthetic oligonucleotide
cggctgcggatcaatacccgctcactgtaatcccagtaattgtagggctc

SEQ ID NO: 1929 - DNA, 50 bp, Artificial Sequence
  Synthetic oligonucleotide
agaacgtggggctcagcatcgccgtggtagactacgactggtgaggggcg

SEQ ID NO: 1930 - DNA, 50 bp, Artificial Sequence
  Synthetic oligonucleotide
gggcttgctcccctaaccaaggcgcttcgggatcgcggggctggtgttcg

SEQ ID NO: 1931 - DNA, 50 bp, Artificial Sequence
  Synthetic oligonucleotide
cggatactttccagggaaggaaataagacaggaacatgtgccctagtgga

SEQ ID NO: 1932 - DNA, 50 bp, Artificial Sequence
  Synthetic oligonucleotide
agtgtttcctctacatctcgacccattgctgttgggagcggcaccttacg

SEQ ID NO: 1933 - DNA, 50 bp, Artificial Sequence
  Synthetic oligonucleotide
cgcggagtttcgttgtgttgttacacaagccagcttttggtttgttagtt

SEQ ID NO: 1934 - DNA, 50 bp, Artificial Sequence
  Synthetic oligonucleotide
cgccctccgcgccgagaatgcgcccttctgcccgggcttgatatcacttt

SEQ ID NO: 1935 - DNA, 50 bp, Artificial Sequence
  Synthetic oligonucleotide
cgagcagagaagacatcttccttggttttgctctgcggggctccccgcag

SEQ ID NO: 1936 - DNA, 50 bp, Artificial Sequence
  Synthetic oligonucleotide
cgagtatgaagtcgtaatcccatagctgtgagttcaagtctggaattctt

SEQ ID NO: 1937 - DNA, 50 bp, Artificial Sequence
  Synthetic oligonucleotide
cgcgggaccaaagcttccggcgtgtccccaactttgtggcgccctcaggc

SEQ ID NO: 1938 - DNA, 50 bp, Artificial Sequence
  Synthetic oligonucleotide
agcggctccgaagtggacaggtggctccccagggtgcggaggcgagggcg

SEQ ID NO: 1939 - DNA, 50 bp, Artificial Sequence
  Synthetic oligonucleotide
gttgcatgaacgagtggtgtgaagcctgttgggtagcttggccactcccg

SEQ ID NO: 1940 - DNA, 50 bp, Artificial Sequence
  Synthetic oligonucleotide
tgatggtgttgcaggctggcccagggacttgtgggctttgggccaggtcg

SEQ ID NO: 1941 - DNA, 50 bp, Artificial Sequence
  Synthetic oligonucleotide
cgagccctctcgggccccgccaagtattttgtttgttcgaaagtcttctc

SEQ ID NO: 1942 - DNA, 50 bp, Artificial Sequence
  Synthetic oligonucleotide
cgttgctttgctcggtaagatccctgcaagcctttatttgaaactagcct

SEQ ID NO: 1943 - DNA, 50 bp, Artificial Sequence
  Synthetic oligonucleotide
cgctgggtacctcctacaaggcctttagtccaggcatgaaggcagttcag

SEQ ID NO: 1944 - DNA, 50 bp, Artificial Sequence
  Synthetic oligonucleotide
cgctagggggatacatcgacgccgagatccagaactgcttagccaagttg

SEQ ID NO: 1945 - DNA, 50 bp, Artificial Sequence
  Synthetic oligonucleotide
aaacttggaacagctaccacaaagcgaacgcctatctgtttggaatttcg

SEQ ID NO: 1946 - DNA, 50 bp, Artificial Sequence
  Synthetic oligonucleotide
cgcgggtaccaggggccatggggagcctgctcgatctcctgtagatctcc

SEQ ID NO: 1947 - DNA, 50 bp, Artificial Sequence
  Synthetic oligonucleotide
cgtgtgctgtaattctaaggaaaacattagtagcctatttttagcaagta

SEQ ID NO: 1948 - DNA, 50 bp, Artificial Sequence
  Synthetic oligonucleotide
cgcctctcggctctcagcagctccaagcccccgccacagccctccgccac

SEQ ID NO: 1949 - DNA, 50 bp, Artificial Sequence
  Synthetic oligonucleotide
ttgtttagaagagtgaaaccttctgtcttgccgtgggcctggtgaaaacg

SEQ ID NO: 1950 - DNA, 50 bp, Artificial Sequence
  Synthetic oligonucleotide
ggaaactctaaagcgccggataaataagcgctgcaacaggcaaccacacg

SEQ ID NO: 1951 - DNA, 50 bp, Artificial Sequence
  Synthetic oligonucleotide
gtatctttagaccttagcgcatccatctctcggttctttcgtcaagaccg

SEQ ID NO: 1952 - DNA, 50 bp, Artificial Sequence
  Synthetic oligonucleotide
cggctgcttcacggggcaggagggcacctggaatcccccgccaggtccct

SEQ ID NO: 1953 - DNA, 50 bp, Artificial Sequence
  Synthetic oligonucleotide
cggggttcgagtcgcagcctccagcctcaacccgcacctcccgccctgca

SEQ ID NO: 1954 - DNA, 50 bp, Artificial Sequence
  Synthetic oligonucleotide
cgccattttgtcaagggaaaaagcagatggaggtcgtgtatatacaaata

SEQ ID NO: 1955 - DNA, 50 bp, Artificial Sequence
  Synthetic oligonucleotide
cccactggcagatgcctttggtaagctcgccaatggcaggctttcatgcg

SEQ ID NO: 1956 - DNA, 50 bp, Artificial Sequence
  Synthetic oligonucleotide
gggatcgcatttgctccttcttggactctatgaatcttatcctaagtacg

SEQ ID NO: 1957 - DNA, 50 bp, Artificial Sequence
  Synthetic oligonucleotide
cgatgcagcatctattggggaaggaatttagcttctactgcagtgtgact

SEQ ID NO: 1958 - DNA, 50 bp, Artificial Sequence
  Synthetic oligonucleotide
cggcgactcccaggtgaagctacctgcaccccacccgggttggggtggat

SEQ ID NO: 1959 - DNA, 50 bp, Artificial Sequence
  Synthetic oligonucleotide
caaacgccgcataggtgggagggcggcggtttggaacattctgccatccg

SEQ ID NO: 1960 - DNA, 50 bp, Artificial Sequence
  Synthetic oligonucleotide
ccctactgggcctggtggaggattgggtgggccttcactcctgctccacg

SEQ ID NO: 1961 - DNA, 50 bp, Artificial Sequence
  Synthetic oligonucleotide
cggaaaaaactatccttgagtgaggcctgacactgtgcctgtgatgatgt

SEQ ID NO: 1962 - DNA, 50 bp, Artificial Sequence
  Synthetic oligonucleotide
cggtatcacttcggctgcgaacatgcctgaaccagctaagtcagctcccg

SEQ ID NO: 1963 - DNA, 50 bp, Artificial Sequence
  Synthetic oligonucleotide
cgccggcgggacaggcacttggaaagcaagatccagggttctgaagatta

SEQ ID NO: 1964 - DNA, 50 bp, Artificial Sequence
  Synthetic oligonucleotide
gcggtctaaagtgtttactctgcttcttctcagaaatggctttgatagcg

SEQ ID NO: 1965 - DNA, 50 bp, Artificial Sequence
  Synthetic oligonucleotide
cgggcctggggggtcacccacaggaaaggtgagattagcagcaccatgtg

SEQ ID NO: 1966 - DNA, 50 bp, Artificial Sequence
  Synthetic oligonucleotide
agcctcagctgtgtccttagaggcctgaagtctctcctggcctcactccg

SEQ ID NO: 1967 - DNA, 50 bp, Artificial Sequence
  Synthetic oligonucleotide
cccctagtgacacagccagtgccagaactaactttgactttcactcttcg

SEQ ID NO: 1968 - DNA, 50 bp, Artificial Sequence
  Synthetic oligonucleotide
cgcactacgagaaggggagtttgatcttgtctcattggcgtctcgggtct

SEQ ID NO: 1969 - DNA, 50 bp, Artificial Sequence
  Synthetic oligonucleotide
cggagacagcggcagggatgcggctctgctctacaggcagacagaaactt

SEQ ID NO: 1970 - DNA, 50 bp, Artificial Sequence
  Synthetic oligonucleotide
tggccagggccctcatccaggagccaggaaacatctactaccacgagtcg

SEQ ID NO: 1971 - DNA, 50 bp, Artificial Sequence
  Synthetic oligonucleotide
ggattccgaggatccgagggagtcgctttcagacttccggtgtcctttcg

SEQ ID NO: 1972 - DNA, 50 bp, Artificial Sequence
  Synthetic oligonucleotide
cggtttggtatccatccgctgctccctccagcgcggctcttcgcgacctc

SEQ ID NO: 1973 - DNA, 50 bp, Artificial Sequence
  Synthetic oligonucleotide
ttgtatcctaaatctggtcctcaagattcttgaagtcccccagtccatcg

SEQ ID NO: 1974 - DNA, 50 bp, Artificial Sequence
  Synthetic oligonucleotide
cgcggcagagttcgcgggcttagcagacccgcccattggctcttgcatct

SEQ ID NO: 1975 - DNA, 50 bp, Artificial Sequence
  Synthetic oligonucleotide
tggaaccgggagtcgtgtcagcacatccttgagaggcaggggtgtggacg

SEQ ID NO: 1976 - DNA, 50 bp, Artificial Sequence
  Synthetic oligonucleotide
cgcagatgagttagagacacagagaagtgtacatccttcagcctttcccg

SEQ ID NO: 1977 - DNA, 50 bp, Artificial Sequence
  Synthetic oligonucleotide
gctgtgctctgttcccttctgacttactgtttgtttggggcgtctggacg

SEQ ID NO: 1978 - DNA, 50 bp, Artificial Sequence
  Synthetic oligonucleotide
ggaaccgctgcctttcaggaaaggtgctgacgtgggccactgccgcttcg

SEQ ID NO: 1979 - DNA, 50 bp, Artificial Sequence
  Synthetic oligonucleotide
cggaccagtgtctccggagaatgctattctcctacatttccgaacaggtt

SEQ ID NO: 1980 - DNA, 50 bp, Artificial Sequence
  Synthetic oligonucleotide
cggatgggaaacctcagtcgtttaggcacccctccgctcgagtcacttcc

SEQ ID NO: 1981 - DNA, 50 bp, Artificial Sequence
  Synthetic oligonucleotide
agtggctagtggatcgtgcacccaccctcggaggcccggagtggatcccg

SEQ ID NO: 1982 - DNA, 50 bp, Artificial Sequence
  Synthetic oligonucleotide
cggaagtgagctggatgacagggatcagtttgcagcccaccttgccaaac

SEQ ID NO: 1983 - DNA, 50 bp, Artificial Sequence
  Synthetic oligonucleotide
ggcattacaataccagaggtaacgaatcaattaaatccattttcccctcg

SEQ ID NO: 1984 - DNA, 50 bp, Artificial Sequence
  Synthetic oligonucleotide
cgctgtggcctgagacgcttttcttaaaggtcccgatgacaaggacttgg

SEQ ID NO: 1985 - DNA, 50 bp, Artificial Sequence
  Synthetic oligonucleotide
aactctgaaacctgagggcctctgccggaagctgctgttcggcccatccg

SEQ ID NO: 1986 - DNA, 50 bp, Artificial Sequence
  Synthetic oligonucleotide
agagagaacggttaggcaggcaggaggtccacagtgagtggctgcaggcg

SEQ ID NO: 1987 - DNA, 50 bp, Artificial Sequence
  Synthetic oligonucleotide
cgacagagtccacgacgatggccgagggaacaacactgtcccgtcccaga

SEQ ID NO: 1988 - DNA, 50 bp, Artificial Sequence
  Synthetic oligonucleotide
taaagagtaaaatcacgcgcaatccatcccaatataaccgcagttgttcg

SEQ ID NO: 1989 - DNA, 50 bp, Artificial Sequence
  Synthetic oligonucleotide
aaacccctggtacctgagcactgatctgccttggagaacctggtgagtcg

SEQ ID NO: 1990 - DNA, 50 bp, Artificial Sequence
  Synthetic oligonucleotide
cggatttgaaccaagaggccatgagatggtaccttgttttgtttttagca

SEQ ID NO: 1991 - DNA, 50 bp, Artificial Sequence
  Synthetic oligonucleotide
gctctctgcgagagtgcgggtggcggcacggccgggttagacaaggctcg

SEQ ID NO: 1992 - DNA, 50 bp, Artificial Sequence
  Synthetic oligonucleotide
agagagatatgtaaggcccagggagccgatggcgccctgcagtgacagcg

SEQ ID NO: 1993 - DNA, 50 bp, Artificial Sequence
  Synthetic oligonucleotide
gctcactcgtgtggactggaaacgctccgagccggttattttaaaaaccg

SEQ ID NO: 1994 - DNA, 50 bp, Artificial Sequence
  Synthetic oligonucleotide
tgcaaagcctgggaacagtgagggcattaggaccaggagtgacgcgcacg

SEQ ID NO: 1995 - DNA, 50 bp, Artificial Sequence
  Synthetic oligonucleotide
tggggggtttgcggtgggcgggcactgcgctcttggacacgtgggtggcg

SEQ ID NO: 1996 - DNA, 50 bp, Artificial Sequence
  Synthetic oligonucleotide
acccaacggagggtttattctgcccagcttcacatctgggggtcaaatcg

SEQ ID NO: 1997 - DNA, 50 bp, Artificial Sequence
  Synthetic oligonucleotide
cgccccggcgtctttgtgcgcgagcctcgttcagcccctcttcgcatgtc

SEQ ID NO: 1998 - DNA, 50 bp, Artificial Sequence
  Synthetic oligonucleotide
cgcctggggcctgaagctcgtggaatcacccgcctcacgtgtctttgcgg

SEQ ID NO: 1999 - DNA, 50 bp, Artificial Sequence
  Synthetic oligonucleotide
acgagaaggtgccactcaaacctgagtcaaggaacacagctaagtcctcg

SEQ ID NO: 2000 - DNA, 50 bp, Artificial Sequence
  Synthetic oligonucleotide
aggggtgcctgcgtgctggttgctgctgcccggggcgaggcgccgtagcg

SEQ ID NO: 2001 - DNA, 50 bp, Artificial Sequence
  Synthetic oligonucleotide
gcgtcggctgtgatggggagcccggagcagccaggcggcgagcagtagcg

SEQ ID NO: 2002 - DNA, 50 bp, Artificial Sequence
  Synthetic oligonucleotide
aaggggttccccgcttgagctaacgtagtggtggcatccagaggtgaacg

SEQ ID NO: 2003 - DNA, 50 bp, Artificial Sequence
  Synthetic oligonucleotide
cgggcctcaccgaagaaaacaggttgctggcaacgcggacaggtccagct

SEQ ID NO: 2004 - DNA, 50 bp, Artificial Sequence
  Synthetic oligonucleotide
cggccaggagaccctccctgtgcaggcaatgccgggtgaggcatcgctcc

SEQ ID NO: 2005 - DNA, 50 bp, Artificial Sequence
  Synthetic oligonucleotide
ttactcgagaatcaaaataaagaggcgagccagcgttccagaaaatcacg

SEQ ID NO: 2006 - DNA, 50 bp, Artificial Sequence
  Synthetic oligonucleotide
cggaattacctgatttgtgcctggatttactgatagtaataagagtgatg

SEQ ID NO: 2007 - DNA, 50 bp, Artificial Sequence
  Synthetic oligonucleotide
cggggtcagcctcctgccagctctcataagtagatctaattatgaccgct

SEQ ID NO: 2008 - DNA, 50 bp, Artificial Sequence
  Synthetic oligonucleotide
ggtggctcttggtgcagggcatgctgctctcggaggagttggggtctgcg

SEQ ID NO: 2009 - DNA, 50 bp, Artificial Sequence
  Synthetic oligonucleotide
cgggcctgggtttagggtccacagctcttgccaaattccagaggctggaa

SEQ ID NO: 2010 - DNA, 50 bp, Artificial Sequence
  Synthetic oligonucleotide
cgcccccaggctcccactccatgaggtatttcagcgccgccgtgtcccgg

SEQ ID NO: 2011 - DNA, 50 bp, Artificial Sequence
  Synthetic oligonucleotide
cgaagacctgtattacaggtagtcacttgtctgtattaatactgagatgt

SEQ ID NO: 2012 - DNA, 50 bp, Artificial Sequence
  Synthetic oligonucleotide
cgctgtgcttagtcaggatacaaggagggaactcggcacacgataagtat

SEQ ID NO: 2013 - DNA, 50 bp, Artificial Sequence
  Synthetic oligonucleotide
ctcactggaggggacgggtctggagcaggcagagtgagccgctgcttgcg

SEQ ID NO: 2014 - DNA, 50 bp, Artificial Sequence
  Synthetic oligonucleotide
tttggaacctctgcaaacactttctcctgggtcagtttcccgccaaaccg

SEQ ID NO: 2015 - DNA, 50 bp, Artificial Sequence
  Synthetic oligonucleotide
tgttttccctctgcgatgtcctcttttaattcactaggtcaggaaaagcg

SEQ ID NO: 2016 - DNA, 50 bp, Artificial Sequence
  Synthetic oligonucleotide
caggatccggaggcagcgccctgtgcaactttggcaactcggaggacgcg

SEQ ID NO: 2017 - DNA, 50 bp, Artificial Sequence
  Synthetic oligonucleotide
cagtattcgcacactgataagaacacctccccataatcccctggccagcg

SEQ ID NO: 2018 - DNA, 50 bp, Artificial Sequence
  Synthetic oligonucleotide
cggcgtgtgagctttgtcctttggtggggctcctggccacgggccgaacg

SEQ ID NO: 2019 - DNA, 50 bp, Artificial Sequence
  Synthetic oligonucleotide
caggggactggggaccgagcaggagctggcggggtgagctctgcgaagcg

SEQ ID NO: 2020 - DNA, 50 bp, Artificial Sequence
  Synthetic oligonucleotide
cgctccactcaggcctggacagccagcccgctgttattttcacctgtagt

SEQ ID NO: 2021 - DNA, 50 bp, Artificial Sequence
  Synthetic oligonucleotide
atggagggaagtcactggtcacacaataccctttgggtcggtgtgaatcg

SEQ ID NO: 2022 - DNA, 50 bp, Artificial Sequence
  Synthetic oligonucleotide
tgggcggaaggcatcccggtccctgaaagtagggacccacctctctttcg

SEQ ID NO: 2023 - DNA, 50 bp, Artificial Sequence
  Synthetic oligonucleotide
acctcgcaggaggtgacaggaggacgctgggtcgaatcacagtcctagcg

SEQ ID NO: 2024 - DNA, 50 bp, Artificial Sequence
  Synthetic oligonucleotide
ttgtgacatagttgtaatacaaactcagccgccttgcactgcatcttgcg

SEQ ID NO: 2025 - DNA, 50 bp, Artificial Sequence
  Synthetic oligonucleotide
cgcaagtagtatgacatataacagggcttggcaaatctttgctgtagaga

SEQ ID NO: 2026 - DNA, 50 bp, Artificial Sequence
  Synthetic oligonucleotide
caagagctcctaattcggtgacactacaccacaatatgtgtgataagtcg

SEQ ID NO: 2027 - DNA, 50 bp, Artificial Sequence
  Synthetic oligonucleotide
cgaaaacacaaatagtaagtggtaagaagggctgaagttactacctactg

SEQ ID NO: 2028 - DNA, 50 bp, Artificial Sequence
  Synthetic oligonucleotide
cacaagtcctatcacactacataattcagggcgcgaaactggaagattcg

SEQ ID NO: 2029 - DNA, 50 bp, Artificial Sequence
  Synthetic oligonucleotide
cgtggaggtggagcaggacaacaagatgacccccgggaacctgggcatcg

SEQ ID NO: 2030 - DNA, 50 bp, Artificial Sequence
  Synthetic oligonucleotide
cggcagctagcccgccccagttcttaaagctgcagagctgctggcagctg

SEQ ID NO: 2031 - DNA, 50 bp, Artificial Sequence
  Synthetic oligonucleotide
ttgaaggtagcgaggacttattatcacagtatcctttgaaaacccattcg

SEQ ID NO: 2032 - DNA, 50 bp, Artificial Sequence
  Synthetic oligonucleotide
cgctttggggactgcgttttatccacgataaaccatttcccgagaaaggg

SEQ ID NO: 2033 - DNA, 50 bp, Artificial Sequence
  Synthetic oligonucleotide
gcaggagtagtgagcgatgccggggctggctttcctagatttaggaaccg

SEQ ID NO: 2034 - DNA, 50 bp, Artificial Sequence
  Synthetic oligonucleotide
ggctctcacctgaaccccgaagcgtagtgtcttctctctggactaaagcg

SEQ ID NO: 2035 - DNA, 50 bp, Artificial Sequence
  Synthetic oligonucleotide
agtttccgtgcgcccgagagcgtgtgaattgctcctaattaccgtgtccg

SEQ ID NO: 2036 - DNA, 50 bp, Artificial Sequence
  Synthetic oligonucleotide
cgcgtggcaggctcccagaggagagggccctgttatttacgtctttgtca

SEQ ID NO: 2037 - DNA, 50 bp, Artificial Sequence
  Synthetic oligonucleotide
ttcttaccccctgtatcaaagagttaaaatctaattttttcccaagatcg

SEQ ID NO: 2038 - DNA, 50 bp, Artificial Sequence
  Synthetic oligonucleotide
cgataacattccaaccagaccgtgcttttcaaatgcccccgaaaatagcg

SEQ ID NO: 2039 - DNA, 50 bp, Artificial Sequence
  Synthetic oligonucleotide
cgggtctgcctgaggataggcatcctccatacctggcaagcagcaagcgg

SEQ ID NO: 2040 - DNA, 50 bp, Artificial Sequence
  Synthetic oligonucleotide
tttcctttaaaattgcattttctgcagaactcaaaatctagactgggtcg

SEQ ID NO: 2041 - DNA, 50 bp, Artificial Sequence
  Synthetic oligonucleotide
ccgatgcaggctcagatatgctgcctgcgggatgtcgtgctttccaggcg

SEQ ID NO: 2042 - DNA, 50 bp, Artificial Sequence
  Synthetic oligonucleotide
gtagaagaaagcgcctcattcttttccaggcatataaggacgaacccacg

SEQ ID NO: 2043 - DNA, 50 bp, Artificial Sequence
  Synthetic oligonucleotide
cgacttctttctacagttactaagcgcccactgtgtgccctggaagggac

SEQ ID NO: 2044 - DNA, 50 bp, Artificial Sequence
  Synthetic oligonucleotide
ttcagaggccttatagcctcggcgaagcatgctgggtgcgggcggaggcg

SEQ ID NO: 2045 - DNA, 50 bp, Artificial Sequence
  Synthetic oligonucleotide
gtggctttactgaggcgactggaggcttttgagcatcccaatgttgtccg

SEQ ID NO: 2046 - DNA, 50 bp, Artificial Sequence
  Synthetic oligonucleotide
cgagggactgttaaccatgaccgtcctcatagattaaattaggtacttgc

SEQ ID NO: 2047 - DNA, 50 bp, Artificial Sequence
  Synthetic oligonucleotide
cgccgcgacagaggggaagcaattgtaccctaaagtctacactgtctgtc

SEQ ID NO: 2048 - DNA, 50 bp, Artificial Sequence
  Synthetic oligonucleotide
caagtgggggatccgcggcagtgaggactgtagggtgcgcgggtactccg

SEQ ID NO: 2049 - DNA, 50 bp, Artificial Sequence
  Synthetic oligonucleotide
tgaggtaggaagtctgagcattgccgacgggccggagcaaatcgctcccg

SEQ ID NO: 2050 - DNA, 50 bp, Artificial Sequence
  Synthetic oligonucleotide
ggttgtgattaatttttccgaggggatttgggccgggagcttacggaacg

SEQ ID NO: 2051 - DNA, 50 bp, Artificial Sequence
  Synthetic oligonucleotide
cgccccccgcccaacccgaggcggcgatcccggcccccacagtcgctccc

SEQ ID NO: 2052 - DNA, 50 bp, Artificial Sequence
  Synthetic oligonucleotide
agtgccggtgaataattcatggggctgggaggcccttatctccctggccg

SEQ ID NO: 2053 - DNA, 50 bp, Artificial Sequence
  Synthetic oligonucleotide
cgctgccagagtatttgtgggaagagaaagaggaggttggatgaatcact

SEQ ID NO: 2054 - DNA, 50 bp, Artificial Sequence
  Synthetic oligonucleotide
cgctccccccacgagccgccgcactccctaaatgaatgaactggctgctc

SEQ ID NO: 2055 - DNA, 50 bp, Artificial Sequence
  Synthetic oligonucleotide
cggcctctgtcgagccctccgctcctatgcgctctgcactcggcgcaccg

SEQ ID NO: 2056 - DNA, 50 bp, Artificial Sequence
  Synthetic oligonucleotide
cgtctcttggggcttgccgagatgggcggagccttgggttatgatgggcg

SEQ ID NO: 2057 - DNA, 50 bp, Artificial Sequence
  Synthetic oligonucleotide
actgactggttgcatcttggccaactgctcctaggcagggctgcatttcg

SEQ ID NO: 2058 - DNA, 50 bp, Artificial Sequence
  Synthetic oligonucleotide
cggggaccttcgcgagttactttgtaaaggcgaatccaggcaagagagcc

SEQ ID NO: 2059 - DNA, 50 bp, Artificial Sequence
  Synthetic oligonucleotide
cggcctccgccctcctggcccagcggcccccacccgaccccacccgaccc

SEQ ID NO: 2060 - DNA, 50 bp, Artificial Sequence
  Synthetic oligonucleotide
atgcttaaatttccactgttggacgaattctgagcgcccagggagcagcg

SEQ ID NO: 2061 - DNA, 50 bp, Artificial Sequence
  Synthetic oligonucleotide
cgccctccggcacacactgctgctcctgccagcccttctgagctcaggta

SEQ ID NO: 2062 - DNA, 50 bp, Artificial Sequence
  Synthetic oligonucleotide
agggaggatcgtgtgggattctctgtgctccgaaggagtcctgcatttcg

SEQ ID NO: 2063 - DNA, 50 bp, Artificial Sequence
  Synthetic oligonucleotide
cgctcgaggacctttgccctgggccgccgggcccgcccccccacaggaac

SEQ ID NO: 2064 - DNA, 50 bp, Artificial Sequence
  Synthetic oligonucleotide
gctgaccaccaggaataaacagattcctggcaatagccattattagatcg

SEQ ID NO: 2065 - DNA, 50 bp, Artificial Sequence
  Synthetic oligonucleotide
cgaagggccccgaaggcaacccggtgggtaggggcgcggcggacaggacg

SEQ ID NO: 2066 - DNA, 50 bp, Artificial Sequence
  Synthetic oligonucleotide
gacctctggggccccgggaacaggacatgaaccctgaggggaacaggacg

SEQ ID NO: 2067 - DNA, 50 bp, Artificial Sequence
  Synthetic oligonucleotide
caggagatggctcgtggcaaattgctttgttagtcttgtcagcgcggccg

SEQ ID NO: 2068 - DNA, 50 bp, Artificial Sequence
  Synthetic oligonucleotide
gaggcattgacttttgcgctgtttgcccgcggcctcggagcaagcagacg

SEQ ID NO: 2069 - DNA, 50 bp, Artificial Sequence
  Synthetic oligonucleotide
tacactccaacgaggcgttacagtcatgctccgggtcccaagtggatccg

SEQ ID NO: 2070 - DNA, 50 bp, Artificial Sequence
  Synthetic oligonucleotide
cgccaaaatcttagcccagagcttgggtgcaagggttgagttgagtgtag

SEQ ID NO: 2071 - DNA, 50 bp, Artificial Sequence
  Synthetic oligonucleotide
aacaaataatttaaaaataaatctccatgaaaactctggagagcagcccg

SEQ ID NO: 2072 - DNA, 50 bp, Artificial Sequence
  Synthetic oligonucleotide
cgaagtgataccgtcaaatgaccacaggaaaatgctggtgagcccaaacg

SEQ ID NO: 2073 - DNA, 50 bp, Artificial Sequence
  Synthetic oligonucleotide
gcgggatgagctgctttccaaaaaggatctcggtgattggaccgagctcg

SEQ ID NO: 2074 - DNA, 50 bp, Artificial Sequence
  Synthetic oligonucleotide
tggctcggcggatcagatcgctcggtgccgaggaggacaatacagtgacg

SEQ ID NO: 2075 - DNA, 50 bp, Artificial Sequence
  Synthetic oligonucleotide
cgcaaattgtccacctcgtgttgctaagcgattgtttgtcggccccgcac

SEQ ID NO: 2076 - DNA, 50 bp, Artificial Sequence
  Synthetic oligonucleotide
cgggcccatcccccacagcacccccaacgatctcggggtccagccacacc

SEQ ID NO: 2077 - DNA, 50 bp, Artificial Sequence
  Synthetic oligonucleotide
cgcgccccaagagcctctgccaggccgctgggacttgattcatttcttga

SEQ ID NO: 2078 - DNA, 50 bp, Artificial Sequence
  Synthetic oligonucleotide
cagcctgtagaaatccgtgctttgcttcctgcacggcgggtagagcagcg

SEQ ID NO: 2079 - DNA, 50 bp, Artificial Sequence
  Synthetic oligonucleotide
cggacgcagcccgcgtgctccccgagctattgcactggagccgccctccc

SEQ ID NO: 2080 - DNA, 50 bp, Artificial Sequence
  Synthetic oligonucleotide
cggctttgcaacaggcattactcgccattgattggtgcccacccagggca

SEQ ID NO: 2081 - DNA, 50 bp, Artificial Sequence
  Synthetic oligonucleotide
ggccgaggccgcggctgtcggggtggcctggacgggtgcagggctgggcg

SEQ ID NO: 2082 - DNA, 50 bp, Artificial Sequence
  Synthetic oligonucleotide
agagcggggggctacagccggggctcagggctcggggctcgggggccacg

SEQ ID NO: 2083 - DNA, 50 bp, Artificial Sequence
  Synthetic oligonucleotide
tctcccgatccaactcacgagagataaagatgtctaaataaccacgaccg

SEQ ID NO: 2084 - DNA, 50 bp, Artificial Sequence
  Synthetic oligonucleotide
cgcgggagcagttcatcgctctgtaccggctgcgaccgctcgtctacacc

SEQ ID NO: 2085 - DNA, 50 bp, Artificial Sequence
  Synthetic oligonucleotide
aaccctggcaagccacagcttcctgcagtgtcctgttgccatgggttacg

SEQ ID NO: 2086 - DNA, 50 bp, Artificial Sequence
  Synthetic oligonucleotide
taaaatccgcctgcccgcagtgagtgggaactgctgcagatcattaaacg

SEQ ID NO: 2087 - DNA, 50 bp, Artificial Sequence
  Synthetic oligonucleotide
cggagcccattggtcggaacacctcacaatggaccccagcggcgcgcaaa

SEQ ID NO: 2088 - DNA, 50 bp, Artificial Sequence
  Synthetic oligonucleotide
cggcccactcctcttgttaaaagtaaaaccaggccgggcgcggtggctca

SEQ ID NO: 2089 - DNA, 50 bp, Artificial Sequence
  Synthetic oligonucleotide
cctcgaagccacaggccccaccttccgatggaagattaatctggaggccg

SEQ ID NO: 2090 - DNA, 50 bp, Artificial Sequence
  Synthetic oligonucleotide
gccatttgagcgtgtttcagccagataattacgttgccattgtgttaccg

SEQ ID NO: 2091 - DNA, 50 bp, Artificial Sequence
  Synthetic oligonucleotide
cgcttttcagctcctcaggtgataacagaagccaaactccaagatagtgg

SEQ ID NO: 2092 - DNA, 50 bp, Artificial Sequence
  Synthetic oligonucleotide
tcactccatgccatgagagagaacctggcagtgtcagattcactccagcg

SEQ ID NO: 2093 - DNA, 50 bp, Artificial Sequence
  Synthetic oligonucleotide
cctggcacaaagggccacgggcgcgagggactcgatgagctgggagatcg

SEQ ID NO: 2094 - DNA, 50 bp, Artificial Sequence
  Synthetic oligonucleotide
cgtggttgcgtaagcacatctaaaggttaaactccaagcagctaatctgc

SEQ ID NO: 2095 - DNA, 50 bp, Artificial Sequence
  Synthetic oligonucleotide
cgcatatccgcatccacgcgggctacaagcccttcgtctgcgaattttgc

SEQ ID NO: 2096 - DNA, 50 bp, Artificial Sequence
  Synthetic oligonucleotide
agccatgaacataaatccggccaagtcgtggccccgcagcgtgggctgcg

SEQ ID NO: 2097 - DNA, 50 bp, Artificial Sequence
  Synthetic oligonucleotide
agcgctgacttgatgcggccaggtttctgggaccaggaggttgggacacg

SEQ ID NO: 2098 - DNA, 50 bp, Artificial Sequence
  Synthetic oligonucleotide
cggccaggtttcaagggcttttcttgggtagaagaaagcgcctcattctt

SEQ ID NO: 2099 - DNA, 50 bp, Artificial Sequence
  Synthetic oligonucleotide
cgccttctaaagcctcgcccagcgccgccgaagcagcttcacctctccaa

SEQ ID NO: 2100 - DNA, 50 bp, Artificial Sequence
  Synthetic oligonucleotide
cgcccccctcccagaggcgtcccgcacctgtctgaactgttaagaaatct

SEQ ID NO: 2101 - DNA, 50 bp, Artificial Sequence
  Synthetic oligonucleotide
aattacactttaccgtagtctctatcaaatgggagcccagaggaactccg

SEQ ID NO: 2102 - DNA, 50 bp, Artificial Sequence
  Synthetic oligonucleotide
tgtttcggaaagtccaggttttcctcggggaggacttcaaactcactgcg

SEQ ID NO: 2103 - DNA, 50 bp, Artificial Sequence
  Synthetic oligonucleotide
cggatcctggagtagagacgaacggttcctgaagctcccggtaaatgccc

SEQ ID NO: 2104 - DNA, 50 bp, Artificial Sequence
  Synthetic oligonucleotide
acagggaaggtgcctggggaggggccgggcggtgctgtctcctgactccg

SEQ ID NO: 2105 - DNA, 50 bp, Artificial Sequence
  Synthetic oligonucleotide
acttaggggttcaaatgctgcattaccgcgctcgggtgagcgactgcccg

SEQ ID NO: 2106 - DNA, 50 bp, Artificial Sequence
  Synthetic oligonucleotide
cgctaacaagcattggaatcgcaggctcagagccagatggccttagagac

SEQ ID NO: 2107 - DNA, 50 bp, Artificial Sequence
  Synthetic oligonucleotide
agggatttccctgtcttaagatcagttctacaagcctcgaccacccatcg

SEQ ID NO: 2108 - DNA, 50 bp, Artificial Sequence
  Synthetic oligonucleotide
cgccaccccgctcagtctcagcgggacacctccacagccagtaggaaggg

SEQ ID NO: 2109 - DNA, 50 bp, Artificial Sequence
  Synthetic oligonucleotide
gcgaaaagtagctggagccggagcagggacagaacctgttgctgcagacg

SEQ ID NO: 2110 - DNA, 50 bp, Artificial Sequence
  Synthetic oligonucleotide
cggccgtccacgcaggaaccgcagtacttgggccggtatttcttcacact

SEQ ID NO: 2111 - DNA, 50 bp, Artificial Sequence
  Synthetic oligonucleotide
cggggccactttgaccgccaatagtggggaagtcagagctaatcctcaga

SEQ ID NO: 2112 - DNA, 50 bp, Artificial Sequence
  Synthetic oligonucleotide
agcaggttctgcggtagagagcgcagtcctgctggcctctggagagtgcg

SEQ ID NO: 2113 - DNA, 50 bp, Artificial Sequence
  Synthetic oligonucleotide
cgggaatctgagccgtgccaatcgacgtggggaaaatttcacagctgctg

SEQ ID NO: 2114 - DNA, 50 bp, Artificial Sequence
  Synthetic oligonucleotide
cgtgaaataaaaaccaacccagaccagactggggcgctttttctgacggg

SEQ ID NO: 2115 - DNA, 50 bp, Artificial Sequence
  Synthetic oligonucleotide
cgccggggtgcgctccaggcttggctgcaaaccccccaagaattagaaag

SEQ ID NO: 2116 - DNA, 50 bp, Artificial Sequence
  Synthetic oligonucleotide
cacttgggcggctgctggcagcgatgagcagagacgtttagccctcagcg

SEQ ID NO: 2117 - DNA, 50 bp, Artificial Sequence
  Synthetic oligonucleotide
ctaaccactctgcctaagcagctatgacagtgcatcccacagttaaaacg

SEQ ID NO: 2118 - DNA, 50 bp, Artificial Sequence
  Synthetic oligonucleotide
gggccttgaaagcgaactcaggagatggggcgttgtgtataggcaagtcg

SEQ ID NO: 2119 - DNA, 50 bp, Artificial Sequence
  Synthetic oligonucleotide
cgggacctctggacatcctccatcccggtttggcgggaaactgacccagg

SEQ ID NO: 2120 - DNA, 50 bp, Artificial Sequence
  Synthetic oligonucleotide
cgacaggaccattctggagaaccattttggcaaaattgctaaagtgcagc

SEQ ID NO: 2121 - DNA, 50 bp, Artificial Sequence
  Synthetic oligonucleotide
agttggttatgatgttttttcccctactcagctctaaaaaaacatcctcg

SEQ ID NO: 2122 - DNA, 50 bp, Artificial Sequence
  Synthetic oligonucleotide
cttcctcgcctgcgggtggtgcgttgggaaggcatggggtgcggaacccg

SEQ ID NO: 2123 - DNA, 50 bp, Artificial Sequence
  Synthetic oligonucleotide
gggcctcttcggagggagctgagggccgcgttccttctgaaagcgggacg

SEQ ID NO: 2124 - DNA, 50 bp, Artificial Sequence
  Synthetic oligonucleotide
ccatggggaggctgcggggacgcggggctgcagagagcggcagtggcacg

SEQ ID NO: 2125 - DNA, 50 bp, Artificial Sequence
  Synthetic oligonucleotide
cgacccgctcgtcgacgagcgcctgttcaacacctctgactcctgctcct

SEQ ID NO: 2126 - DNA, 50 bp, Artificial Sequence
  Synthetic oligonucleotide
cgccggactgggtaaagccagccctgtagctgaaatgtaggtagattgtt

SEQ ID NO: 2127 - DNA, 50 bp, Artificial Sequence
  Synthetic oligonucleotide
cggacttccttgaaatgacaaacaagtaaatatttaagggaataagtaaa

SEQ ID NO: 2128 - DNA, 50 bp, Artificial Sequence
  Synthetic oligonucleotide
tagtttgacaagtaagataccacaagtctgtctgtcactaagagcaaacg

SEQ ID NO: 2129 - DNA, 50 bp, Artificial Sequence
  Synthetic oligonucleotide
cgcggtccccaacaccagactcccgcagccaccgcgcccggtcccgccct

SEQ ID NO: 2130 - DNA, 50 bp, Artificial Sequence
  Synthetic oligonucleotide
ataaagcacattcagagactggctagaagtcttaagcttggtcgtgcacg

SEQ ID NO: 2131 - DNA, 50 bp, Artificial Sequence
  Synthetic oligonucleotide
gcaggtggtgggcttcgtcacgagcttcgtgggctggatcggggtcatcg

SEQ ID NO: 2132 - DNA, 50 bp, Artificial Sequence
  Synthetic oligonucleotide
cgaaaacaattcctcatgaggagtgagctgagagcagaaatccagtggat

SEQ ID NO: 2133 - DNA, 50 bp, Artificial Sequence
  Synthetic oligonucleotide
tcattcagccttaggggggcatttctgcattcttttccaacaagatgacg

SEQ ID NO: 2134 - DNA, 50 bp, Artificial Sequence
  Synthetic oligonucleotide
tctacgggctcggcaagaggtgacgtaagcggaatgggctcccaggagcg

SEQ ID NO: 2135 - DNA, 50 bp, Artificial Sequence
  Synthetic oligonucleotide
cgccccgggcctttcagacacttttctggaatgtgaagggaggtgggggc

SEQ ID NO: 2136 - DNA, 50 bp, Artificial Sequence
  Synthetic oligonucleotide
tacaattacgtgcagtacatcataaaattccaacaatatgtaactcttcg

SEQ ID NO: 2137 - DNA, 50 bp, Artificial Sequence
  Synthetic oligonucleotide
cgcgcacacccgcgcagcgcgcacagccccctggtgcagctcctgccatt

SEQ ID NO: 2138 - DNA, 50 bp, Artificial Sequence
  Synthetic oligonucleotide
aggagtggagacgagtcaacgccccttcgtacagcagtgaggttagaacg

SEQ ID NO: 2139 - DNA, 50 bp, Artificial Sequence
  Synthetic oligonucleotide
cgcagtctcaggccccacgcaatccttttgcaaagccaagaagtgtgtgt

SEQ ID NO: 2140 - DNA, 50 bp, Artificial Sequence
  Synthetic oligonucleotide
cgcaggaggagctgacacttcacacatttgtcaagattactgtcaggccc

SEQ ID NO: 2141 - DNA, 50 bp, Artificial Sequence
  Synthetic oligonucleotide
cgccttccatgggcacgcggccccaggacggccctctattaaaggatcct

SEQ ID NO: 2142 - DNA, 50 bp, Artificial Sequence
  Synthetic oligonucleotide
cgccaccaaccgcccgcggagccagacctcccagctctgcgccccaggac

SEQ ID NO: 2143 - DNA, 50 bp, Artificial Sequence
  Synthetic oligonucleotide
acgggggacctggccggagttgacaaggggcaactttgtacgtccacccg

SEQ ID NO: 2144 - DNA, 50 bp, Artificial Sequence
  Synthetic oligonucleotide
ttatttccaactcttccaagatgcagactccctaatggtgggtcacatcg

SEQ ID NO: 2145 - DNA, 50 bp, Artificial Sequence
  Synthetic oligonucleotide
cggctccaccaccccaggtgggggcatgtgcccactcatccaccagcaca

SEQ ID NO: 2146 - DNA, 50 bp, Artificial Sequence
  Synthetic oligonucleotide
cgcaaattcgttaaattatgatacaataaggccaacctcgaggatcctcg

SEQ ID NO: 2147 - DNA, 50 bp, Artificial Sequence
  Synthetic oligonucleotide
cgctctagcatgcgtccgagctctgttgctttttacagccgcctggtccc

SEQ ID NO: 2148 - DNA, 50 bp, Artificial Sequence
  Synthetic oligonucleotide
cggtctcagagggaaggagcgctctaggaaaggaggatcctttaatagag

SEQ ID NO: 2149 - DNA, 50 bp, Artificial Sequence
  Synthetic oligonucleotide
cgccaggacccggcgggtgtcatgtgtagggggaaatcaaataaaacata

SEQ ID NO: 2150 - DNA, 50 bp, Artificial Sequence
  Synthetic oligonucleotide
cgctgcgccctgccgcaatcagtggacagccgaatacttcattcgtttct

SEQ ID NO: 2151 - DNA, 50 bp, Artificial Sequence
  Synthetic oligonucleotide
cgccctgagttgaggtatccacccaggcttcggagtcattggaagggaaa

SEQ ID NO: 2152 - DNA, 50 bp, Artificial Sequence
  Synthetic oligonucleotide
gaggtgcgcgctctgtacgaggagacggagcagcttcgggagcagagccg

SEQ ID NO: 2153 - DNA, 50 bp, Artificial Sequence
  Synthetic oligonucleotide
cagaaatgcccccctaaggctgaatgagcaccacttccacactcagggcg

SEQ ID NO: 2154 - DNA, 50 bp, Artificial Sequence
  Synthetic oligonucleotide
ccggtcttgactggaaaagctggtcattaattagcctccttttgccttcg

SEQ ID NO: 2155 - DNA, 50 bp, Artificial Sequence
  Synthetic oligonucleotide
ggcgaggtgggcggggcggggcctgagggggcctggacgggcaccgggcg

SEQ ID NO: 2156 - DNA, 50 bp, Artificial Sequence
  Synthetic oligonucleotide
gagggggccgctggctgggcaccggcggggcgggggagcctagtgtggcg

SEQ ID NO: 2157 - DNA, 50 bp, Artificial Sequence
  Synthetic oligonucleotide
agcaatggaagcagccgagcgtggcctcgcccatggtgaactggagaacg

SEQ ID NO: 2158 - DNA, 50 bp, Artificial Sequence
  Synthetic oligonucleotide
cgtccagcgacctgcactactgggtcgggaagcaggcgggtgcggaagcg

SEQ ID NO: 2159 - DNA, 50 bp, Artificial Sequence
  Synthetic oligonucleotide
cggccactgaaagcctccctgttcctgggcagggcagccagagtgccctc

SEQ ID NO: 2160 - DNA, 50 bp, Artificial Sequence
  Synthetic oligonucleotide
cggacacctgtaagtgtgatttacaagactgagggcaaatgccaggagcc

SEQ ID NO: 2161 - DNA, 50 bp, Artificial Sequence
  Synthetic oligonucleotide
acataggcatatccagttccttagacattgactgggtctcctgggttgcg

SEQ ID NO: 2162 - DNA, 50 bp, Artificial Sequence
  Synthetic oligonucleotide
gctggcgtggccctcagggatcctttcttttcttcccccagaacattgcg

SEQ ID NO: 2163 - DNA, 50 bp, Artificial Sequence
  Synthetic oligonucleotide
cgccacacacggtcggctcttccggcgccaacatgaccctggcttgttcc

SEQ ID NO: 2164 - DNA, 50 bp, Artificial Sequence
  Synthetic oligonucleotide
tgcttagccaccacagtgatcaatgctcagttcgtcggggcctgagagcg

SEQ ID NO: 2165 - DNA, 50 bp, Artificial Sequence
  Synthetic oligonucleotide
cggggttcgtcccggctgtcacgccaccttgtgacatcacagggccatgc

SEQ ID NO: 2166 - DNA, 50 bp, Artificial Sequence
  Synthetic oligonucleotide
cgctcgccagtaataatatttcattacgctgctccagaggcttcctggag

SEQ ID NO: 2167 - DNA, 50 bp, Artificial Sequence
  Synthetic oligonucleotide
cgtccgcagagatacctctgtgccctgggattccctcatcccgctcagga

SEQ ID NO: 2168 - DNA, 50 bp, Artificial Sequence
  Synthetic oligonucleotide
ttttaatttccttttctttctgtgctttgcagaaagggcttggcctggcg

SEQ ID NO: 2169 - DNA, 50 bp, Artificial Sequence
  Synthetic oligonucleotide
cgcgggatcaggacgtgggttgcctccccgacaccttgtatgcatcctga

SEQ ID NO: 2170 - DNA, 50 bp, Artificial Sequence
  Synthetic oligonucleotide
cgcctgctcccagagacttgcacgcctcaatctctgcgtgtatctgactg

SEQ ID NO: 2171 - DNA, 50 bp, Artificial Sequence
  Synthetic oligonucleotide
cggaaatgagtcatagttgtgcccaattaatattagggaataatcgatga

SEQ ID NO: 2172 - DNA, 50 bp, Artificial Sequence
  Synthetic oligonucleotide
tccctgccagtcacaagcctcgggattatgcgatcagaatgtgcgctccg

SEQ ID NO: 2173 - DNA, 50 bp, Artificial Sequence
  Synthetic oligonucleotide
cggggctctcaagcccagtaggctccaatccgttgagttcctgttttgat

SEQ ID NO: 2174 - DNA, 50 bp, Artificial Sequence
  Synthetic oligonucleotide
caagtggagtggttctaaatttctgataaccaatgagcgccgaggaaccg

SEQ ID NO: 2175 - DNA, 50 bp, Artificial Sequence
  Synthetic oligonucleotide
aaaggcagatcccgcggcttgggagtgagcagagtggctaaatccagacg

SEQ ID NO: 2176 - DNA, 50 bp, Artificial Sequence
  Synthetic oligonucleotide
atgaattcccggtgctgatgtccagaagaacaatttcataaccctgttcg

SEQ ID NO: 2177 - DNA, 50 bp, Artificial Sequence
  Synthetic oligonucleotide
cggtagtcaagggaaaatcctgactcagggtgtggggttcatgaatgaga

SEQ ID NO: 2178 - DNA, 50 bp, Artificial Sequence
  Synthetic oligonucleotide
tgccagcccagagtccttagtcggataatgtatcacagatacaacagtcg

SEQ ID NO: 2179 - DNA, 50 bp, Artificial Sequence
  Synthetic oligonucleotide
ggagctcggccccgcgcggggcagagggagtggtccagggctcgggagcg

SEQ ID NO: 2180 - DNA, 50 bp, Artificial Sequence
  Synthetic oligonucleotide
caagcgcggcctcggaaccgaatggacaaagacgacgggggctggagacg

SEQ ID NO: 2181 - DNA, 50 bp, Artificial Sequence
  Synthetic oligonucleotide
cggtggcagcagagacaggcagagcgcagttcccgcccacccctgctccc

SEQ ID NO: 2182 - DNA, 50 bp, Artificial Sequence
  Synthetic oligonucleotide
atctggtgcatctgctccccacgagcgcgggcacctggggcgagagagcg

SEQ ID NO: 2183 - DNA, 50 bp, Artificial Sequence
  Synthetic oligonucleotide
ggaagaggtttgtcctggtacttcgctcagcgttactttcaagaaagccg

SEQ ID NO: 2184 - DNA, 50 bp, Artificial Sequence
  Synthetic oligonucleotide
cgggtcaattcagaaaccagctcccctgggggcaagtttggctctgtgct

SEQ ID NO: 2185 - DNA, 50 bp, Artificial Sequence
  Synthetic oligonucleotide
gctgtcatcactgattgttctgaaactgctttcctccacagcatcttacg

SEQ ID NO: 2186 - DNA, 50 bp, Artificial Sequence
  Synthetic oligonucleotide
cgctgccagctcttcaaacgttacccgagggcccggacgctgcttccgca

SEQ ID NO: 2187 - DNA, 50 bp, Artificial Sequence
  Synthetic oligonucleotide
catgtgacgagatgagacgtggatgctcccctgtcctcggcagccagtcg

SEQ ID NO: 2188 - DNA, 50 bp, Artificial Sequence
  Synthetic oligonucleotide
aaggtaggctgtcttttcttccctcgccggcagtaaaggaaaccttctcg

SEQ ID NO: 2189 - DNA, 50 bp, Artificial Sequence
  Synthetic oligonucleotide
cgtgcccaaaccattaggagatatcaatgtaggcaagcctgaagctcact

SEQ ID NO: 2190 - DNA, 50 bp, Artificial Sequence
  Synthetic oligonucleotide
ttttgcgtctggatttcctccgtagagaggcgctgggcctgagccaagcg

SEQ ID NO: 2191 - DNA, 50 bp, Artificial Sequence
  Synthetic oligonucleotide
tgaccttccctctaaaaggtaacacgtagagattcctaaaggaaccatcg

SEQ ID NO: 2192 - DNA, 50 bp, Artificial Sequence
  Synthetic oligonucleotide
cgagagcacttgaaaatgaaatgactgtctaagagatctggtcaaagcaa

SEQ ID NO: 2193 - DNA, 50 bp, Artificial Sequence
  Synthetic oligonucleotide
cggcctctgtcgggagaaattctgagcagagccgttagctgctctaacgt

SEQ ID NO: 2194 - DNA, 50 bp, Artificial Sequence
  Synthetic oligonucleotide
cgcagaagagatttacccacaagcaaggtgggaaagagtgaaagctttgc

SEQ ID NO: 2195 - DNA, 50 bp, Artificial Sequence
  Synthetic oligonucleotide
acagcaaatggagcagcagagtgcacaccaccagaccccgctggagaacg

SEQ ID NO: 2196 - DNA, 50 bp, Artificial Sequence
  Synthetic oligonucleotide
ctcagcaccatagcagacagggtggcaataccattaccaaaataataccg

SEQ ID NO: 2197 - DNA, 50 bp, Artificial Sequence
  Synthetic oligonucleotide
cgggcagctcgcccgtcttgagctcccagcagaaatcgcaatcgctttag

SEQ ID NO: 2198 - DNA, 50 bp, Artificial Sequence
  Synthetic oligonucleotide
gaatctcaagatctgggcaaaggctcgcgtctcgggacgcgaagtcgacg

SEQ ID NO: 2199 - DNA, 50 bp, Artificial Sequence
  Synthetic oligonucleotide
cgcccgagtcctgcttcccacccaccggggcaggcgctcacagactgtgt

SEQ ID NO: 2200 - DNA, 50 bp, Artificial Sequence
  Synthetic oligonucleotide
cgggctgtgctcctttgacttgaccttgaatctagagacttggtggtaaa

SEQ ID NO: 2201 - DNA, 50 bp, Artificial Sequence
  Synthetic oligonucleotide
ggtggagaaagccgctagagcaaatttggggccggaccaggcagcactcg

SEQ ID NO: 2202 - DNA, 50 bp, Artificial Sequence
  Synthetic oligonucleotide
tgttagagatactactcacatcccacttccactttattacagagattacg

SEQ ID NO: 2203 - DNA, 50 bp, Artificial Sequence
  Synthetic oligonucleotide
aggcctggcaggccggggcgcatttcctccagcttctggaagacttgccg

SEQ ID NO: 2204 - DNA, 50 bp, Artificial Sequence
  Synthetic oligonucleotide
agtgcacgaatgtctcacaggagcaaggctggctcaagtctaattttccg

SEQ ID NO: 2205 - DNA, 50 bp, Artificial Sequence
  Synthetic oligonucleotide
ctggggctgggggaacgtattccttgcttgcccttggggcagggtggccg

SEQ ID NO: 2206 - DNA, 50 bp, Artificial Sequence
  Synthetic oligonucleotide
ggtggcaggagggccggcggagcgccatggcctgcatcctgaaggtaacg

SEQ ID NO: 2207 - DNA, 50 bp, Artificial Sequence
  Synthetic oligonucleotide
cgccgggaactcatttggggcgcagctccaccgacccctcggctactcgc

SEQ ID NO: 2208 - DNA, 50 bp, Artificial Sequence
  Synthetic oligonucleotide
cggggcagcatgggtacccagggctgagaaagacagtcacggttttcttt

SEQ ID NO: 2209 - DNA, 50 bp, Artificial Sequence
  Synthetic oligonucleotide
cgcctgccggcagggatggggctccacgggcaccacagggttaacagccc

SEQ ID NO: 2210 - DNA, 50 bp, Artificial Sequence
  Synthetic oligonucleotide
cgcccacaggctgaccctgcaacctctggcccggtggctaccttctgctt

SEQ ID NO: 2211 - DNA, 50 bp, Artificial Sequence
  Synthetic oligonucleotide
tctatcacttcatgcaacagcctggaaaatgatcagaattttggtctacg

SEQ ID NO: 2212 - DNA, 50 bp, Artificial Sequence
  Synthetic oligonucleotide
ttggtaacacctgggagctcgttagaaatgcagaatccaggctgggcacg

SEQ ID NO: 2213 - DNA, 50 bp, Artificial Sequence
  Synthetic oligonucleotide
tgggtgggtttaactcagctagcagctgcggcggtcttggcgcgctctcg

SEQ ID NO: 2214 - DNA, 50 bp, Artificial Sequence
  Synthetic oligonucleotide
ttcttgcggctgctggcggggggatcgggtgggggtgttccctctgttcg

SEQ ID NO: 2215 - DNA, 50 bp, Artificial Sequence
  Synthetic oligonucleotide
cgacggacaggaaacggtgaaaactacaccccggcaaatgccccaacagg

SEQ ID NO: 2216 - DNA, 50 bp, Artificial Sequence
  Synthetic oligonucleotide
ccaggtcttgaggggcgggtcaggggcgtgaccagagcggcccggaaccg

SEQ ID NO: 2217 - DNA, 50 bp, Artificial Sequence
  Synthetic oligonucleotide
tctgtctcggtgatgctagggacttttcctactgaaatgacctgagcccg

SEQ ID NO: 2218 - DNA, 50 bp, Artificial Sequence
  Synthetic oligonucleotide
gggctgtggccctgagtgtggtgcatctgggtcacacaacaaaaccctcg

SEQ ID NO: 2219 - DNA, 50 bp, Artificial Sequence
  Synthetic oligonucleotide
cggcgaccggaccccgaagcgcactacttgcctgccaacgccttgctccg

SEQ ID NO: 2220 - DNA, 50 bp, Artificial Sequence
  Synthetic oligonucleotide
cgccctgaattatgtagtgtgataggacttgtgatcagctactaggtctc

SEQ ID NO: 2221 - DNA, 50 bp, Artificial Sequence
  Synthetic oligonucleotide
gcggggagtggggcgtggcaggtggccgcgcctggggcagcgggtgcacg

SEQ ID NO: 2222 - DNA, 50 bp, Artificial Sequence
  Synthetic oligonucleotide
atttttgtccgagcccggttaaaaaacgggtgcctgagttgcgtgtgtcg

SEQ ID NO: 2223 - DNA, 50 bp, Artificial Sequence
  Synthetic oligonucleotide
cgcttggctgcctcagcttacacttcccagcaggatctggctgggagccc

SEQ ID NO: 2224 - DNA, 50 bp, Artificial Sequence
  Synthetic oligonucleotide
cgctctcccagcacccagaaccaggagtcctccgcccagacgcccagcag

SEQ ID NO: 2225 - DNA, 50 bp, Artificial Sequence
  Synthetic oligonucleotide
tggcccctgtcgagtgcagggccaaggcttgtgttcaatcgtgtgaatcg

SEQ ID NO: 2226 - DNA, 50 bp, Artificial Sequence
  Synthetic oligonucleotide
cgggcaacttccattctgtggatcccgcagtaacccggacatagtaggtg

SEQ ID NO: 2227 - DNA, 50 bp, Artificial Sequence
  Synthetic oligonucleotide
cgcgcttcccaaaacgaagagcagagctgacaccttccacatcgttcccg

SEQ ID NO: 2228 - DNA, 50 bp, Artificial Sequence
  Synthetic oligonucleotide
ttaaggtcaagttagtgtcttatcttgggtgactcaaaatcaccgcatcg

SEQ ID NO: 2229 - DNA, 50 bp, Artificial Sequence
  Synthetic oligonucleotide
ccagctcagcatgtagcaaggaccaccgagtgccagcctggttccctacg

SEQ ID NO: 2230 - DNA, 50 bp, Artificial Sequence
  Synthetic oligonucleotide
ctgggcgccaggtgggctcctgggagggtgatgaagcaggtagggcctcg

SEQ ID NO: 2231 - DNA, 50 bp, Artificial Sequence
  Synthetic oligonucleotide
cgtacctgggagttaagtgcgctccgaagggtggcttctgaaaggtccaa

SEQ ID NO: 2232 - DNA, 50 bp, Artificial Sequence
  Synthetic oligonucleotide
ctcctggctggggtggcgctgcagggagaaccgcgagctctcaggggtcg

SEQ ID NO: 2233 - DNA, 50 bp, Artificial Sequence
  Synthetic oligonucleotide
cgccctaccatggctgggcgcaagcggcccccgaggacacccccgggccc

SEQ ID NO: 2234 - DNA, 50 bp, Artificial Sequence
  Synthetic oligonucleotide
cgggcatggggcgccaatacgtgacaaaccgtccgtattgcgccctcccc

SEQ ID NO: 2235 - DNA, 50 bp, Artificial Sequence
  Synthetic oligonucleotide
cgctcggcccctctggaataaaacacccgcgagccccgagggcccagagg

SEQ ID NO: 2236 - DNA, 50 bp, Artificial Sequence
  Synthetic oligonucleotide
cgtcgcctccagccccgaccccggtaagtgaacggcccccttcgctgccg

SEQ ID NO: 2237 - DNA, 50 bp, Artificial Sequence
  Synthetic oligonucleotide
aaccttggagaccctggcccgcacgcggagtggcgtagtgctagctaccg

SEQ ID NO: 2238 - DNA, 50 bp, Artificial Sequence
  Synthetic oligonucleotide
cgcgagttccaccagtcgggctgcgttttgtgaacatggaaaccagattt

SEQ ID NO: 2239 - DNA, 50 bp, Artificial Sequence
  Synthetic oligonucleotide
cggccctccctagcctggcgcctcaagctcgccgcccggcttccccgtga

SEQ ID NO: 2240 - DNA, 50 bp, Artificial Sequence
  Synthetic oligonucleotide
cggcaccacctggagccgaccatccttatccttgtactggaccacgaagg

SEQ ID NO: 2241 - DNA, 50 bp, Artificial Sequence
  Synthetic oligonucleotide
atggagccgccctctccccaggaccacaggggcgctttccagtgaaggcg

SEQ ID NO: 2242 - DNA, 50 bp, Artificial Sequence
  Synthetic oligonucleotide
acttggacagaaagattcgaggcaaatattctaggctgggaaatttcgcg

SEQ ID NO: 2243 - DNA, 50 bp, Artificial Sequence
  Synthetic oligonucleotide
cggaaacacttggaagctgaacatcagcccgaggactcactatgcttccc

SEQ ID NO: 2244 - DNA, 50 bp, Artificial Sequence
  Synthetic oligonucleotide
aaagcttccaactgttcccttccctgggtggcggcagctgcccaaggtcg

SEQ ID NO: 2245 - DNA, 50 bp, Artificial Sequence
  Synthetic oligonucleotide
cgcctgtgtgcccactcaatagcaagcccaaagcatgcatcccagaacag

SEQ ID NO: 2246 - DNA, 50 bp, Artificial Sequence
  Synthetic oligonucleotide
cgcacagcctgcctagccctagccccgtacccctcgggggtatgccctcg

SEQ ID NO: 2247 - DNA, 50 bp, Artificial Sequence
  Synthetic oligonucleotide
ttccccctcgaagcgtttccactcagttcttgatcattcatgtgaaaacg

SEQ ID NO: 2248 - DNA, 50 bp, Artificial Sequence
  Synthetic oligonucleotide
tcttacagtggcagcttgttgctctttgatgccctgagagggcatttccg

SEQ ID NO: 2249 - DNA, 50 bp, Artificial Sequence
  Synthetic oligonucleotide
aaggaaggcttcggtgactcaggtgagcgcctttctcttcttggcagccg

SEQ ID NO: 2250 - DNA, 50 bp, Artificial Sequence
  Synthetic oligonucleotide
acatcagtctttcccccgggtctggatggatccatctgtgatagatcacg

SEQ ID NO: 2251 - DNA, 50 bp, Artificial Sequence
  Synthetic oligonucleotide
cggccaatctttccaaaatgcgctctcactctgttggctgctccggcagg

SEQ ID NO: 2252 - DNA, 50 bp, Artificial Sequence
  Synthetic oligonucleotide
tttttggtttctcttcctcatcttctttgttctttgatattgcagtctcg

SEQ ID NO: 2253 - DNA, 50 bp, Artificial Sequence
  Synthetic oligonucleotide
cggagtacttgtaaggttactgttactccaaaatgtttgtacctactatg

SEQ ID NO: 2254 - DNA, 50 bp, Artificial Sequence
  Synthetic oligonucleotide
ggggcggtggtgctgggcctgctcccccagccgggcaggtggcctttgcg

SEQ ID NO: 2255 - DNA, 50 bp, Artificial Sequence
  Synthetic oligonucleotide
cggccatgtcttccatctccagaatcttcccagcaatcaggaacaggatg

SEQ ID NO: 2256 - DNA, 50 bp, Artificial Sequence
  Synthetic oligonucleotide
tagtaaggagcccacccttggatcttggagagagctcccttttaatatcg

SEQ ID NO: 2257 - DNA, 50 bp, Artificial Sequence
  Synthetic oligonucleotide
cggctctcactagctccgcagccccgtctatttttagctcgtgcccaccc

SEQ ID NO: 2258 - DNA, 50 bp, Artificial Sequence
  Synthetic oligonucleotide
tttatgacaagaagacctctcggcttcttgtaactggggattcaacctcg

SEQ ID NO: 2259 - DNA, 50 bp, Artificial Sequence
  Synthetic oligonucleotide
tggcataaactggccactttcctccatcctggcataaaatggaggcaccg

SEQ ID NO: 2260 - DNA, 50 bp, Artificial Sequence
  Synthetic oligonucleotide
ccgagtggtagtccctccgggggtcaaggcccgagagctggggcaaggcg

SEQ ID NO: 2261 - DNA, 50 bp, Artificial Sequence
  Synthetic oligonucleotide
cgctgagaaaggcaactcggaggcgtagaaaatggatttctgagccaacg

SEQ ID NO: 2262 - DNA, 50 bp, Artificial Sequence
  Synthetic oligonucleotide
cggccccctccaggaaccgcctcccccgccagccaagactccattgacca

SEQ ID NO: 2263 - DNA, 50 bp, Artificial Sequence
  Synthetic oligonucleotide
cgccaggacaccgccttttggactggggctgaattctgccccttgaagct

SEQ ID NO: 2264 - DNA, 50 bp, Artificial Sequence
  Synthetic oligonucleotide
cgggcgcagacctgccctacctgccctccaactgggccaacaccgcctcc

SEQ ID NO: 2265 - DNA, 50 bp, Artificial Sequence
  Synthetic oligonucleotide
cgaaggccagtgggaaccgtgaggagacgcacaacctggtttgggccacg

SEQ ID NO: 2266 - DNA, 50 bp, Artificial Sequence
  Synthetic oligonucleotide
gtttttcaacccgagtttccaatccagtgttcatctccagagttagaacg

SEQ ID NO: 2267 - DNA, 50 bp, Artificial Sequence
  Synthetic oligonucleotide
cgtgctaaagatggcacagatgggttacatccaggcaaaacttgggcatt

SEQ ID NO: 2268 - DNA, 50 bp, Artificial Sequence
  Synthetic oligonucleotide
cgggccacccctgcctctgggtctcctgattccttggcctcgtcccctgc

SEQ ID NO: 2269 - DNA, 50 bp, Artificial Sequence
  Synthetic oligonucleotide
cgcccaggccagctcagggtgttcccgtgggggtctccggaaacaatggt

SEQ ID NO: 2270 - DNA, 50 bp, Artificial Sequence
  Synthetic oligonucleotide
cgccatatggtcttcccggtccagccaagagcctggaaccacgtgacctg

SEQ ID NO: 2271 - DNA, 50 bp, Artificial Sequence
  Synthetic oligonucleotide
caatattctagaggccgcggggacgcctggtgggtagggctgcagctccg

SEQ ID NO: 2272 - DNA, 50 bp, Artificial Sequence
  Synthetic oligonucleotide
cggcctggcggtcctactcaacaccgcaagatttcaaaagggaaattcct

SEQ ID NO: 2273 - DNA, 50 bp, Artificial Sequence
  Synthetic oligonucleotide
cggccatcacgctgctgccgccccagcgcttctcccgcttgcgccatttg

SEQ ID NO: 2274 - DNA, 50 bp, Artificial Sequence
  Synthetic oligonucleotide
aaggtccacgtcgggtttcagggctccagccgattgttccaagggcgtcg

SEQ ID NO: 2275 - DNA, 50 bp, Artificial Sequence
  Synthetic oligonucleotide
ttggatcgggagaggatcgcacggtttccacctgacggagccacgtcacg

SEQ ID NO: 2276 - DNA, 50 bp, Artificial Sequence
  Synthetic oligonucleotide
ccacgggtcgcatctttcagtgcccagatagactgaagtgcggccaagcg

SEQ ID NO: 2277 - DNA, 50 bp, Artificial Sequence
  Synthetic oligonucleotide
agctcagctgcggtggatactctccttgcaagagggtctcgaagtgggcg

SEQ ID NO: 2278 - DNA, 50 bp, Artificial Sequence
  Synthetic oligonucleotide
taaagacccccaagcagcactgacagtgaacttgtgctaaaggtctttcg

SEQ ID NO: 2279 - DNA, 50 bp, Artificial Sequence
  Synthetic oligonucleotide
cgcagcctgccctgaattttcttcacacagcctgggggcatccgaatgca

SEQ ID NO: 2280 - DNA, 50 bp, Artificial Sequence
  Synthetic oligonucleotide
cgcactcccgccttgggaaccacagggttcgttgctgggaagctgtctcg

SEQ ID NO: 2281 - DNA, 50 bp, Artificial Sequence
  Synthetic oligonucleotide
gggccccttccagtgctgctgggtgcaggtataggcatccgtcccagacg

SEQ ID NO: 2282 - DNA, 50 bp, Artificial Sequence
  Synthetic oligonucleotide
cgcgagagcagagatgccttcagattttattcgcgaaggcaccccacgct

SEQ ID NO: 2283 - DNA, 50 bp, Artificial Sequence
  Synthetic oligonucleotide
acttctggagtgtgtgtgtgccaggtgcgggcgcgagtggccgtgtggcg

SEQ ID NO: 2284 - DNA, 50 bp, Artificial Sequence
  Synthetic oligonucleotide
ggcgacatagcttccagttaattagtcaagaaatgaatcaagtcccagcg

SEQ ID NO: 2285 - DNA, 50 bp, Artificial Sequence
  Synthetic oligonucleotide
caaagagcaaagggctccgggttacgctgcggcgaacgatgcggaagacg

SEQ ID NO: 2286 - DNA, 50 bp, Artificial Sequence
  Synthetic oligonucleotide
cgccgcagacgcttatggcttaaggaggcccaggctcttgggaccagagt

SEQ ID NO: 2287 - DNA, 50 bp, Artificial Sequence
  Synthetic oligonucleotide
cgggacagagaagaatagaaagctgactcagatgaattttgtgatgccaa

SEQ ID NO: 2288 - DNA, 50 bp, Artificial Sequence
  Synthetic oligonucleotide
cggcatttctgtcgattcccgcaggtgccccgtgcacccgctgccccagg

SEQ ID NO: 2289 - DNA, 50 bp, Artificial Sequence
  Synthetic oligonucleotide
ttatatctgcgccaggcggcggctcgagtgaggtcagcggggaggggtcg

SEQ ID NO: 2290 - DNA, 50 bp, Artificial Sequence
  Synthetic oligonucleotide
tggggctttttccaaaaccaagtcccttccagccctgcttgtcctcttcg

SEQ ID NO: 2291 - DNA, 50 bp, Artificial Sequence
  Synthetic oligonucleotide
cgcggcgtgcatcacattatttcatttcaaagaatccgcagagaaacccg

SEQ ID NO: 2292 - DNA, 50 bp, Artificial Sequence
  Synthetic oligonucleotide
cggccgcccgcacatctggcccctagacctgctcggtagaggactggctg

SEQ ID NO: 2293 - DNA, 50 bp, Artificial Sequence
  Synthetic oligonucleotide
ggaccgtcgccagaaggcgcccagaattgggtccctccaggtggggagcg

SEQ ID NO: 2294 - DNA, 50 bp, Artificial Sequence
  Synthetic oligonucleotide
ggaaacaacagtcagagaaaccccaagagcgggcgagctaagtggcgacg

SEQ ID NO: 2295 - DNA, 50 bp, Artificial Sequence
  Synthetic oligonucleotide
cgggccaatcccgaacacatttactttgagcgggaaaagctcagaagcgg

SEQ ID NO: 2296 - DNA, 50 bp, Artificial Sequence
  Synthetic oligonucleotide
ctgtgcccgggagctctgaggtcgctggcggagggtggacccgttccccg

SEQ ID NO: 2297 - DNA, 50 bp, Artificial Sequence
  Synthetic oligonucleotide
cgccgagcctcagctcacacactccgcagaccctcctgcgcccacaccca

SEQ ID NO: 2298 - DNA, 50 bp, Artificial Sequence
  Synthetic oligonucleotide
cgcgcagtcagagctgcctctcgccctcgctagctgggctcgcagcctct

SEQ ID NO: 2299 - DNA, 50 bp, Artificial Sequence
  Synthetic oligonucleotide
cggccctgggtgacagacacaagcttctgaacccaagctaacaaaggcgg

SEQ ID NO: 2300 - DNA, 50 bp, Artificial Sequence
  Synthetic oligonucleotide
cggggttgctggtctcctggtcgcaccaagaagcatcgtttggggttcag

SEQ ID NO: 2301 - DNA, 50 bp, Artificial Sequence
  Synthetic oligonucleotide
ggggggccaacagttgttattttcccaaacccggggatgcggtgagtgcg

SEQ ID NO: 2302 - DNA, 50 bp, Artificial Sequence
  Synthetic oligonucleotide
cgcggcctgagaaaggtggcacagcagcttcccgcccacgcgcctctctc

SEQ ID NO: 2303 - DNA, 50 bp, Artificial Sequence
  Synthetic oligonucleotide
gcgaccaagagtctgtacgagtgactcggtgtttctttccagccggttcg

SEQ ID NO: 2304 - DNA, 50 bp, Artificial Sequence
  Synthetic oligonucleotide
cgccctgactgaagggcccgcagcggaaaacgctgctgcagagcagcact

SEQ ID NO: 2305 - DNA, 50 bp, Artificial Sequence
  Synthetic oligonucleotide
cgcggggaagcggacgcgaaggaaaacctaagttcctaacaactatggaa

SEQ ID NO: 2306 - DNA, 50 bp, Artificial Sequence
  Synthetic oligonucleotide
cgcatggtggcgctgcaggctaaggcttcaaaaaaaggaaaaggaaaaag

SEQ ID NO: 2307 - DNA, 50 bp, Artificial Sequence
  Synthetic oligonucleotide
tatctgtaatttagaccccggagggcgggcctgtgagcgattgctgtccg

SEQ ID NO: 2308 - DNA, 50 bp, Artificial Sequence
  Synthetic oligonucleotide
tacaaatacagagggcggcccagccacgaggcccagctgagggcacggcg

SEQ ID NO: 2309 - DNA, 50 bp, Artificial Sequence
  Synthetic oligonucleotide
gtgcccaagggccacaagagtatgacggggctgtacgagctgctgtgacg

SEQ ID NO: 2310 - DNA, 50 bp, Artificial Sequence
  Synthetic oligonucleotide
cggcctcattagtatgcgcctacgagggaaaatgagacttccccacaggt

SEQ ID NO: 2311 - DNA, 50 bp, Artificial Sequence
  Synthetic oligonucleotide
gtaggcgggcgtcagcggcgcgggcttgctgtctgcgtgcttgctggacg

SEQ ID NO: 2312 - DNA, 50 bp, Artificial Sequence
  Synthetic oligonucleotide
cgcgtggcccccacccactcagctcccagcgcggagtcccgggaccacct

SEQ ID NO: 2313 - DNA, 50 bp, Artificial Sequence
  Synthetic oligonucleotide
tcaaagactttcaagccacttcctagtgtgatgtcacattccttcctacg

SEQ ID NO: 2314 - DNA, 50 bp, Artificial Sequence
  Synthetic oligonucleotide
cgagagcacctgtagttgggatttttttcattgcaaaggcatcgatttta

SEQ ID NO: 2315 - DNA, 50 bp, Artificial Sequence
  Synthetic oligonucleotide
agccagaatagatgcccggagactccggagtccgctgttcaggcgctgcg

SEQ ID NO: 2316 - DNA, 50 bp, Artificial Sequence
  Synthetic oligonucleotide
ccagaggctaaaaagctcagctggaaagctacagtggggcggtgccagcg

SEQ ID NO: 2317 - DNA, 50 bp, Artificial Sequence
  Synthetic oligonucleotide
ctgggcacttagtgtccagtttccacccagaacaaggtggcattctggcg

SEQ ID NO: 2318 - DNA, 50 bp, Artificial Sequence
  Synthetic oligonucleotide
tccagcaacacaaagcgaaaagttagtggaggactacgagcgcgatctcg

SEQ ID NO: 2319 - DNA, 50 bp, Artificial Sequence
  Synthetic oligonucleotide
cttgcgagaagacccctcccagcccaaccagggttagggacgggtgaccg

SEQ ID NO: 2320 - DNA, 50 bp, Artificial Sequence
  Synthetic oligonucleotide
aagctcttgctagagctcctggcttctctcatcctctggagcaattttcg

SEQ ID NO: 2321 - DNA, 50 bp, Artificial Sequence
  Synthetic oligonucleotide
cgcgcaaaacttccatcctgtccacgtgaagttgtcgctgccttagagag

SEQ ID NO: 2322 - DNA, 50 bp, Artificial Sequence
  Synthetic oligonucleotide
aagcatttgaatggacctcagccctaggaccctggcgccctcggaaaccg

SEQ ID NO: 2323 - DNA, 50 bp, Artificial Sequence
  Synthetic oligonucleotide
cgccccgcccgacctcgggtcgcgggctccaaacccagccctccaagggt

SEQ ID NO: 2324 - DNA, 50 bp, Artificial Sequence
  Synthetic oligonucleotide
taatggagggtcgggccaataaattagctttaggaacagacggacggacg

SEQ ID NO: 2325 - DNA, 50 bp, Artificial Sequence
  Synthetic oligonucleotide
ctcaggcatgcctggcccaaagcaggggtgcaggcagcttagggatgacg

SEQ ID NO: 2326 - DNA, 50 bp, Artificial Sequence
  Synthetic oligonucleotide
ttgtgtgatggctcatgacctccgggctgagtggcttggtctccccctcg

SEQ ID NO: 2327 - DNA, 50 bp, Artificial Sequence
  Synthetic oligonucleotide
cgccctgcagctagcgcttttgtacaaggtggaaatttagcggtgggcca

SEQ ID NO: 2328 - DNA, 50 bp, Artificial Sequence
  Synthetic oligonucleotide
cggggaacctgatcctgcctttgactcaattacgccctgacagggaggga

SEQ ID NO: 2329 - DNA, 50 bp, Artificial Sequence
  Synthetic oligonucleotide
gtcacccgggagcagggaacaccaaggaacccagagtcgggcctctttcg

SEQ ID NO: 2330 - DNA, 50 bp, Artificial Sequence
  Synthetic oligonucleotide
ctccctgcttccagctctccatatctgtgaaataaccgtggaaggacacg

SEQ ID NO: 2331 - DNA, 50 bp, Artificial Sequence
  Synthetic oligonucleotide
ccgggcttgctaggctggaggctgggcagccgtctgggaaagcggagccg

SEQ ID NO: 2332 - DNA, 50 bp, Artificial Sequence
  Synthetic oligonucleotide
cggcactgggagggctggtcatttgtttttcaagctgtggagattccaca

SEQ ID NO: 2333 - DNA, 50 bp, Artificial Sequence
  Synthetic oligonucleotide
gctggttttttggaacctctgcaaacactttctcctgggtcagtttcccg

SEQ ID NO: 2334 - DNA, 50 bp, Artificial Sequence
  Synthetic oligonucleotide
gaggctggcggtcactggtcaatcacaggttcgagaagtcgcatgcaccg

SEQ ID NO: 2335 - DNA, 50 bp, Artificial Sequence
  Synthetic oligonucleotide
cgccgggccccatgcacccgggccagccttacctggcgaaaaaggaatcc

SEQ ID NO: 2336 - DNA, 50 bp, Artificial Sequence
  Synthetic oligonucleotide
tccacaggaaccgcggaggacagagcatgcacataggtatgccaacggcg

SEQ ID NO: 2337 - DNA, 50 bp, Artificial Sequence
  Synthetic oligonucleotide
gagttgtgcaaagcctgggaacagtgagggcattaggaccaggagtgacg

SEQ ID NO: 2338 - DNA, 50 bp, Artificial Sequence
  Synthetic oligonucleotide
cgcgctcatcagaagtttaaacaacagccaccaacccgcgagggcagggc

SEQ ID NO: 2339 - DNA, 50 bp, Artificial Sequence
  Synthetic oligonucleotide
ctaccccctctgtcagaagtgtcacagcttttctgccttcggatgtttcg

SEQ ID NO: 2340 - DNA, 50 bp, Artificial Sequence
  Synthetic oligonucleotide
cggtgctgcttgttcatgaagacttgtgctgcagaatccagcaacttcat

SEQ ID NO: 2341 - DNA, 50 bp, Artificial Sequence
  Synthetic oligonucleotide
ggtacactgcaaaagcggcttcaagtcccctccccagctaattaccttcg

SEQ ID NO: 2342 - DNA, 50 bp, Artificial Sequence
  Synthetic oligonucleotide
cgctctgttcctgcttcagtgcgcaccttgacggctccttagggacagac

SEQ ID NO: 2343 - DNA, 50 bp, Artificial Sequence
  Synthetic oligonucleotide
ctgtactggtgagcgcgatgcttcgcctaggtgaacgggacaggtacacg

SEQ ID NO: 2344 - DNA, 50 bp, Artificial Sequence
  Synthetic oligonucleotide
cggcgccactcaccagacttgccagccccgcggcgccccaggatggccag

SEQ ID NO: 2345 - DNA, 50 bp, Artificial Sequence
  Synthetic oligonucleotide
ccgtggcgggggcgcagggtgggggacccctaagaagtgcacagtgcgcg

SEQ ID NO: 2346 - DNA, 50 bp, Artificial Sequence
  Synthetic oligonucleotide
cgcagcccggtgaccaccccgaggagcgcggctccgttacttaccctgtc

SEQ ID NO: 2347 - DNA, 50 bp, Artificial Sequence
  Synthetic oligonucleotide
gactttcttttcacgcgcgcgcccagaatggactggggacctttgggacg

SEQ ID NO: 2348 - DNA, 50 bp, Artificial Sequence
  Synthetic oligonucleotide
cgcttctccacgaggtaaagagttctgcggacttcactagacgcagcgcc

SEQ ID NO: 2349 - DNA, 50 bp, Artificial Sequence
  Synthetic oligonucleotide
gctggaggtgaaacgggcagcctgaggcctccagctcacttggagatacg

SEQ ID NO: 2350 - DNA, 50 bp, Artificial Sequence
  Synthetic oligonucleotide
cggggctggggagatcatggcccgcctcttcagcccccggccgcccccca

SEQ ID NO: 2351 - DNA, 50 bp, Artificial Sequence
  Synthetic oligonucleotide
cgcagtaaattcctaaaggcttgcaagagaaagtggggaataaaaaagtc

SEQ ID NO: 2352 - DNA, 50 bp, Artificial Sequence
  Synthetic oligonucleotide
cgcgcagttgttgaatagactttgcgctaggcaaagacaggttaatcgag

SEQ ID NO: 2353 - DNA, 50 bp, Artificial Sequence
  Synthetic oligonucleotide
ctgggcacctctcatttcggaaggccatcagaggcgcccactactgagcg

SEQ ID NO: 2354 - DNA, 50 bp, Artificial Sequence
  Synthetic oligonucleotide
cgggcagccccacagtgggcgattttcccgcactccgcacgagtccatcc

SEQ ID NO: 2355 - DNA, 50 bp, Artificial Sequence
  Synthetic oligonucleotide
cgtgaaattgtcattctaggggtgatatattactacttcatggattatca

SEQ ID NO: 2356 - DNA, 50 bp, Artificial Sequence
  Synthetic oligonucleotide
cggagctgcgctcctctggaacaaagcagccagacgtggcttgagtggat

SEQ ID NO: 2357 - DNA, 50 bp, Artificial Sequence
  Synthetic oligonucleotide
gggcggcgggaagggcacggtgtccagctggccgtgcgcaggcagcggcg

SEQ ID NO: 2358 - DNA, 50 bp, Artificial Sequence
  Synthetic oligonucleotide
tgcggggagaccaggcagaatagaaacctcggatccctagctaaatagcg

SEQ ID NO: 2359 - DNA, 50 bp, Artificial Sequence
  Synthetic oligonucleotide
ctaactccgtcagagcgcaggcttatagaaggcactgtctccgagctgcg

SEQ ID NO: 2360 - DNA, 50 bp, Artificial Sequence
  Synthetic oligonucleotide
cgcagctgcttgtagtcaacgctaccgaccctgacgaaggagtcaatgcg

SEQ ID NO: 2361 - DNA, 50 bp, Artificial Sequence
  Synthetic oligonucleotide
cgccccaaacaaacagtaagtcagaagggaacagagcacagcacagtccc

SEQ ID NO: 2362 - DNA, 50 bp, Artificial Sequence
  Synthetic oligonucleotide
gcagctcgagcaacaggcggctcagaagggttcgcagccgctggctctcg

SEQ ID NO: 2363 - DNA, 50 bp, Artificial Sequence
  Synthetic oligonucleotide
cggggacttctggtctcctctgtcaggggacaggcaaatcgagtgactag

SEQ ID NO: 2364 - DNA, 50 bp, Artificial Sequence
  Synthetic oligonucleotide
acaatatctacactgggtgagtgcttggccggagaattcccagacaggcg

SEQ ID NO: 2365 - DNA, 50 bp, Artificial Sequence
  Synthetic oligonucleotide
ctgggcgcgcaggaggtataggactctgggattttttggccaaaactccg

SEQ ID NO: 2366 - DNA, 50 bp, Artificial Sequence
  Synthetic oligonucleotide
cgaacaagggagtcttgattagtacatttgggattctggagatggcagaa

SEQ ID NO: 2367 - DNA, 50 bp, Artificial Sequence
  Synthetic oligonucleotide
cggctttcccgccccgaggccccgccgcaggctgcgccctctgacctgca

SEQ ID NO: 2368 - DNA, 50 bp, Artificial Sequence
  Synthetic oligonucleotide
cgcagacatgcatacaccacccgcactccctcgccgtttccaaggcggcg

SEQ ID NO: 2369 - DNA, 50 bp, Artificial Sequence
  Synthetic oligonucleotide
cgcctaggcgtccaagctgtgttccccaccgcgccccactccgcccaagg

SEQ ID NO: 2370 - DNA, 50 bp, Artificial Sequence
  Synthetic oligonucleotide
cggggcccccagcaattctgggccccaaggtcacggtgagccagggctcc

SEQ ID NO: 2371 - DNA, 50 bp, Artificial Sequence
  Synthetic oligonucleotide
cttccaaaacaaggcacagcttaggaaaatcactagtttttaccattacg

SEQ ID NO: 2372 - DNA, 50 bp, Artificial Sequence
  Synthetic oligonucleotide
cgggtactgatgcgagtgcagaggaggcccgtggttcaggtggtggaccg

SEQ ID NO: 2373 - DNA, 50 bp, Artificial Sequence
  Synthetic oligonucleotide
cgccactgccgcctcctcggccccggaccgccgagggttaacaaaaaagc

SEQ ID NO: 2374 - DNA, 50 bp, Artificial Sequence
  Synthetic oligonucleotide
cggaactatcaactggggacaaacctgcgatcgccacggtccttccgccc

SEQ ID NO: 2375 - DNA, 50 bp, Artificial Sequence
  Synthetic oligonucleotide
ccctgaagccgcattggtgggtctccatttagtttgtcctttaaagtccg

SEQ ID NO: 2376 - DNA, 50 bp, Artificial Sequence
  Synthetic oligonucleotide
cgcatctgaaatttagatctgaaaataattacgaagagagccaagaacaa

SEQ ID NO: 2377 - DNA, 50 bp, Artificial Sequence
  Synthetic oligonucleotide
gtcacccttgtcacagttattgaaattccgcaactcgccacaccaggacg

SEQ ID NO: 2378 - DNA, 50 bp, Artificial Sequence
  Synthetic oligonucleotide
cgctttggtggaacaagtgattacaggaacagttccggcaatttagagac

SEQ ID NO: 2379 - DNA, 50 bp, Artificial Sequence
  Synthetic oligonucleotide
cgccccttgtcaaatcgcctccagggtctcggggacccggtgaacaaagc

SEQ ID NO: 2380 - DNA, 50 bp, Artificial Sequence
  Synthetic oligonucleotide
cgcaatctgatcttactagcagtgaaagagcgaggtaagaatttgactat

SEQ ID NO: 2381 - DNA, 50 bp, Artificial Sequence
  Synthetic oligonucleotide
gacccctctggggaggttaacaccaacgtggccttctgctctgtgctacg

SEQ ID NO: 2382 - DNA, 50 bp, Artificial Sequence
  Synthetic oligonucleotide
acaatactttttaacccgatggttacccctctgactccgatgacctttcg

SEQ ID NO: 2383 - DNA, 50 bp, Artificial Sequence
  Synthetic oligonucleotide
cgcagctttcagacctgcagtccatgttaaaaggatcttgtttccaattt

SEQ ID NO: 2384 - DNA, 50 bp, Artificial Sequence
  Synthetic oligonucleotide
ttggggccggtcctgggtgggaggtgggctgcggcgaagctgactttgcg

SEQ ID NO: 2385 - DNA, 50 bp, Artificial Sequence
  Synthetic oligonucleotide
cgctgcagccgaggggcgcgcctggctgatgtgtggttgaatggagagcg

SEQ ID NO: 2386 - DNA, 50 bp, Artificial Sequence
  Synthetic oligonucleotide
cgcctggccatcgtctatatctccttcatgaccgagctcttggagagctg

SEQ ID NO: 2387 - DNA, 50 bp, Artificial Sequence
  Synthetic oligonucleotide
cgccgttcctcccacacgtgtctgaggtgtcagtcgccatgggaacagcc

SEQ ID NO: 2388 - DNA, 50 bp, Artificial Sequence
  Synthetic oligonucleotide
cggctgagcagagctccaatctagaagtgtccggggttttgttaattgta

SEQ ID NO: 2389 - DNA, 50 bp, Artificial Sequence
  Synthetic oligonucleotide
cgcttctcacagaccttgattcctgaaatgatgcaggagcagggtcaatg

SEQ ID NO: 2390 - DNA, 50 bp, Artificial Sequence
  Synthetic oligonucleotide
ggtcctttcggggactgcggctgcttccctgttcgtagactcagcagccg

SEQ ID NO: 2391 - DNA, 50 bp, Artificial Sequence
  Synthetic oligonucleotide
cggcgactctagtgtggcttccaaacttctgggctctgggctcacttcgg

SEQ ID NO: 2392 - DNA, 50 bp, Artificial Sequence
  Synthetic oligonucleotide
ttccccatcaagtcataaagcgagcgggttgggcgagagggcacagctcg

SEQ ID NO: 2393 - DNA, 50 bp, Artificial Sequence
  Synthetic oligonucleotide
cgcgggtgcacccgtgtctcctggacacagaggctgccctctgattgggt

SEQ ID NO: 2394 - DNA, 50 bp, Artificial Sequence
  Synthetic oligonucleotide
cgcccccgcgcccctttggagttctgaccccgcgggtgcacccgtgtctc

SEQ ID NO: 2395 - DNA, 50 bp, Artificial Sequence
  Synthetic oligonucleotide
ccccagaagcctgttcctgagctgattggggttctgggccaggggtctcg

SEQ ID NO: 2396 - DNA, 50 bp, Artificial Sequence
  Synthetic oligonucleotide
cgttgtttgatcatttgtatttcttgcctgatggtcggatttacatggag

SEQ ID NO: 2397 - DNA, 50 bp, Artificial Sequence
  Synthetic oligonucleotide
ctccttcctgtgcaggtatctctgctctttcgagtacagcaggggtgtcg

SEQ ID NO: 2398 - DNA, 50 bp, Artificial Sequence
  Synthetic oligonucleotide
cgcccgccccaagtcaaagctgagcagagcagggatggggaaggtctccg

SEQ ID NO: 2399 - DNA, 50 bp, Artificial Sequence
  Synthetic oligonucleotide
tttattaaatggtccacacctgaaagtaattgagtctcggcgtgggtgcg

SEQ ID NO: 2400 - DNA, 50 bp, Artificial Sequence
  Synthetic oligonucleotide
caatgtattcctaaaaggggccatctgggcggtgtcctcttttcccagcg

SEQ ID NO: 2401 - DNA, 50 bp, Artificial Sequence
  Synthetic oligonucleotide
tcggccaaggccgagcagcacgggaaggtcggggaatcctgggaagctcg

SEQ ID NO: 2402 - DNA, 50 bp, Artificial Sequence
  Synthetic oligonucleotide
acactaaagatgaacaaaaaccaaggctggcgctcacttgcgttgactcg

SEQ ID NO: 2403 - DNA, 50 bp, Artificial Sequence
  Synthetic oligonucleotide
cgaactacagaagtatgaattgactcaagggggctggcagtgatttatgt

SEQ ID NO: 2404 - DNA, 50 bp, Artificial Sequence
  Synthetic oligonucleotide
gtgtcgggacagcgcaggggactggcttggggcggcggtgggtagcggcg

SEQ ID NO: 2405 - DNA, 50 bp, Artificial Sequence
  Synthetic oligonucleotide
tttcccatcctccaccttggctaactgaaccttatcgataggatgagtcg

SEQ ID NO: 2406 - DNA, 50 bp, Artificial Sequence
  Synthetic oligonucleotide
cgccactcatggaccaagtctccgccgatccgtaacagcgctgtgttcag

SEQ ID NO: 2407 - DNA, 50 bp, Artificial Sequence
  Synthetic oligonucleotide
agagatgtctgagcggcgccgggtgttagttcccagtgaatggggaggcg

SEQ ID NO: 2408 - DNA, 50 bp, Artificial Sequence
  Synthetic oligonucleotide
cgcgagcatccttgtttattaaacaacctctaggtgaatggccgggaagc

SEQ ID NO: 2409 - DNA, 50 bp, Artificial Sequence
  Synthetic oligonucleotide
ttttcttgctctcttatccccggccgatgggcttcgtagccttggaaacg

SEQ ID NO: 2410 - DNA, 50 bp, Artificial Sequence
  Synthetic oligonucleotide
cggtcttaacgtggttaccggtgcactgaaactctcagcagcggttggag

SEQ ID NO: 2411 - DNA, 50 bp, Artificial Sequence
  Synthetic oligonucleotide
cggtacccaaatgtcagctgactgtgaataggaatatgaaactggaaatt

SEQ ID NO: 2412 - DNA, 50 bp, Artificial Sequence
  Synthetic oligonucleotide
cgggccacgttggctcagaaatccattttctacgcctccgagttgccttt

SEQ ID NO: 2413 - DNA, 50 bp, Artificial Sequence
  Synthetic oligonucleotide
cgcctatgaatgtcaaagttctgctaggtttctctgaagcctgcttctgc

SEQ ID NO: 2414 - DNA, 50 bp, Artificial Sequence
  Synthetic oligonucleotide
ctaatcaaagacacgtcaaccatcccccgggttgaaataatgggtgttcg

SEQ ID NO: 2415 - DNA, 50 bp, Artificial Sequence
  Synthetic oligonucleotide
ctaaatggagtcagtataaatgctttccaataaagcatgtccagcgctcg

SEQ ID NO: 2416 - DNA, 50 bp, Artificial Sequence
  Synthetic oligonucleotide
cagcaacaagggtgggacggaatccgttccccgccggaaagatggatgcg

SEQ ID NO: 2417 - DNA, 50 bp, Artificial Sequence
  Synthetic oligonucleotide
gttgcagagctaagaaaaaccatcccgccaggccccttcttgtggtaacg

SEQ ID NO: 2418 - DNA, 50 bp, Artificial Sequence
  Synthetic oligonucleotide
ttctgagaacagatctgtagttttctaaacaccctacattgatccaaacg

SEQ ID NO: 2419 - DNA, 50 bp, Artificial Sequence
  Synthetic oligonucleotide
ggcgaaagcggagctgttctgtttaaacgccctttgtgtgtgaggacgcg

SEQ ID NO: 2420 - DNA, 50 bp, Artificial Sequence
  Synthetic oligonucleotide
cgcccttgttagttattcatgagacggagggcaccatgggagctggctct

SEQ ID NO: 2421 - DNA, 50 bp, Artificial Sequence
  Synthetic oligonucleotide
ggggcacggcgcagagctgagataaacgccctttccctggcccaggatcg

SEQ ID NO: 2422 - DNA, 50 bp, Artificial Sequence
  Synthetic oligonucleotide
cgcccaagagtccacaattttcttgtgactcaaatagatggataggtgca

SEQ ID NO: 2423 - DNA, 50 bp, Artificial Sequence
  Synthetic oligonucleotide
tacgttctcgcttaacgattttctcagcggtttaaggaaggctgctctcg

SEQ ID NO: 2424 - DNA, 50 bp, Artificial Sequence
  Synthetic oligonucleotide
cgcgggcatcgaggattctcagcttttggcgtcccagtcctgcctctgct

SEQ ID NO: 2425 - DNA, 50 bp, Artificial Sequence
  Synthetic oligonucleotide
ctgctctaatccagaggggcccaatattccagggatcccagattgctccg

SEQ ID NO: 2426 - DNA, 50 bp, Artificial Sequence
  Synthetic oligonucleotide
cgcggtttctccagatacagttaaactgttagctctctctaggagtcaca

SEQ ID NO: 2427 - DNA, 50 bp, Artificial Sequence
  Synthetic oligonucleotide
cggggagttcctgcgcttccccagggcttcccaaacttcagctctcaaac

SEQ ID NO: 2428 - DNA, 50 bp, Artificial Sequence
  Synthetic oligonucleotide
ggaacttgtgtattttacaactgcgatgcctatcgggaatgtggcaatcg

SEQ ID NO: 2429 - DNA, 50 bp, Artificial Sequence
  Synthetic oligonucleotide
gtgaaaatcaccaggaatacgtactccacctgctcctgggggtgggaccg

SEQ ID NO: 2430 - DNA, 50 bp, Artificial Sequence
  Synthetic oligonucleotide
cgccaagctcttgaacactccggcctctgtcgggagaaattctgagcaga

SEQ ID NO: 2431 - DNA, 50 bp, Artificial Sequence
  Synthetic oligonucleotide
cggccacttccgtcggttggaattctcttaagcattgccctgagtctatt

SEQ ID NO: 2432 - DNA, 50 bp, Artificial Sequence
  Synthetic oligonucleotide
aaagcccatctagggaatctctcatttaggatccatggtcatatgaatcg

SEQ ID NO: 2433 - DNA, 50 bp, Artificial Sequence
  Synthetic oligonucleotide
cgagaccacctacaacagcatcatgaagtgtgacatcgacatcaggaagg

SEQ ID NO: 2434 - DNA, 50 bp, Artificial Sequence
  Synthetic oligonucleotide
cggggcgagaagtgcaccccgcgtctccccgcccccgtgaaaacccagat

SEQ ID NO: 2435 - DNA, 50 bp, Artificial Sequence
  Synthetic oligonucleotide
cgcctcccagacctctggggccatgaatcatttatgaggcaaaaatgaaa

SEQ ID NO: 2436 - DNA, 50 bp, Artificial Sequence
  Synthetic oligonucleotide
cgattcattggcctgaccctttgagcccagagcaatgaagtctcctgggg

SEQ ID NO: 2437 - DNA, 50 bp, Artificial Sequence
  Synthetic oligonucleotide
actttccacattttcctcatgactcaggatcagtttctgactgctgggcg

SEQ ID NO: 2438 - DNA, 50 bp, Artificial Sequence
  Synthetic oligonucleotide
ctatagaagtgtaaagacgaatagcgttctgaactcacccattcgaagcg

SEQ ID NO: 2439 - DNA, 50 bp, Artificial Sequence
  Synthetic oligonucleotide
cggaggtctgggaggctccgggcgaagcctccctgctgcaggtagggtcg

SEQ ID NO: 2440 - DNA, 50 bp, Artificial Sequence
  Synthetic oligonucleotide
ggggcctacggaggccttaaaccccaaagattggcggggacgaagggccg

SEQ ID NO: 2441 - DNA, 50 bp, Artificial Sequence
  Synthetic oligonucleotide
cgtggattcgactgtgccggggagaacccgaggtcaacggccttaggccg

SEQ ID NO: 2442 - DNA, 50 bp, Artificial Sequence
  Synthetic oligonucleotide
tagaggctccccttccccagtgtgggacttagcagagggcgggtccagcg

SEQ ID NO: 2443 - DNA, 50 bp, Artificial Sequence
  Synthetic oligonucleotide
cggcaaccatttgttcctggtgagccccaccaaggccgggcgcctggctc

SEQ ID NO: 2444 - DNA, 50 bp, Artificial Sequence
  Synthetic oligonucleotide
tgaagcccgacggcccttcaacatgtctgcgcaggataagtgagctttcg

SEQ ID NO: 2445 - DNA, 50 bp, Artificial Sequence
  Synthetic oligonucleotide
gggtcggggcgtccctgcgcacatttaaaggggccgtggccatgggcacg

SEQ ID NO: 2446 - DNA, 50 bp, Artificial Sequence
  Synthetic oligonucleotide
atccctagggtgaggagcccgagggggtgcgcccaggcttgggggtagcg

SEQ ID NO: 2447 - DNA, 50 bp, Artificial Sequence
  Synthetic oligonucleotide
cgctttcctgcagaatgtcatgtcactggcaaatgccatggaaccgctcc

SEQ ID NO: 2448 - DNA, 50 bp, Artificial Sequence
  Synthetic oligonucleotide
cggacatgataaacaatctggagaaatgggaaccttattcactttgctcc

SEQ ID NO: 2449 - DNA, 50 bp, Artificial Sequence
  Synthetic oligonucleotide
cgggtttagctgaaggcattatgactccatggcaacagatgattccctga

SEQ ID NO: 2450 - DNA, 50 bp, Artificial Sequence
  Synthetic oligonucleotide
ttggagaagcccttctccattgtctcagtcacttcagggtgcaggaagcg

SEQ ID NO: 2451 - DNA, 50 bp, Artificial Sequence
  Synthetic oligonucleotide
cgggctctgccagtctacacttaagctcttaaggcagtacagagaaccag

SEQ ID NO: 2452 - DNA, 50 bp, Artificial Sequence
  Synthetic oligonucleotide
cgtagagttgccacagcagccggtgccatgacatcggcagagggcagctt

SEQ ID NO: 2453 - DNA, 50 bp, Artificial Sequence
  Synthetic oligonucleotide
caggcacttagtgtcaccatactaggggcgtggcaattctctctcgttcg

SEQ ID NO: 2454 - DNA, 50 bp, Artificial Sequence
  Synthetic oligonucleotide
tgtttgtagctcaggcacccggatgattcatcccatgaaagccttgagcg

SEQ ID NO: 2455 - DNA, 50 bp, Artificial Sequence
  Synthetic oligonucleotide
cgagctcctgcactgccagaacggagggacgtgccacaacaacgtgcgct

SEQ ID NO: 2456 - DNA, 50 bp, Artificial Sequence
  Synthetic oligonucleotide
cggatatagaaacttccacaactgggggccctggctctgacgactttctt

SEQ ID NO: 2457 - DNA, 50 bp, Artificial Sequence
  Synthetic oligonucleotide
gccgggctgggaagacctgagggattagacaggggtccgggcggggctcg

SEQ ID NO: 2458 - DNA, 50 bp, Artificial Sequence
  Synthetic oligonucleotide
ggtctacattgtcaccatggtaggcaaccttggcttgatcattcttttcg

SEQ ID NO: 2459 - DNA, 50 bp, Artificial Sequence
  Synthetic oligonucleotide
acatggtttgcatagctggatctcagcttatctgtgcctttcggctttcg

SEQ ID NO: 2460 - DNA, 50 bp, Artificial Sequence
  Synthetic oligonucleotide
cgggagggggctgcaaggaggctgtcgcgctgttccggagggtgcctgcg

SEQ ID NO: 2461 - DNA, 50 bp, Artificial Sequence
  Synthetic oligonucleotide
caagaatttacatcccacactgagtcatgcagtaagtttagtgcttcccg

SEQ ID NO: 2462 - DNA, 50 bp, Artificial Sequence
  Synthetic oligonucleotide
cgcaccagaggccccgctcttcgttccagcgcttcagcgactccagtttg

SEQ ID NO: 2463 - DNA, 50 bp, Artificial Sequence
  Synthetic oligonucleotide
gggctgagtttggttgggcaggtgctacgcggagctcctgaatgtaagcg

SEQ ID NO: 2464 - DNA, 50 bp, Artificial Sequence
  Synthetic oligonucleotide
gtccaggagacacgggtgcacccgcggggtcagaactccaaaggggcgcg

SEQ ID NO: 2465 - DNA, 50 bp, Artificial Sequence
  Synthetic oligonucleotide
gtcctcgtgactgggtggggctgcctcacttctgcctgatttgggaagcg

SEQ ID NO: 2466 - DNA, 50 bp, Artificial Sequence
  Synthetic oligonucleotide
tcgcgagctccatgttctcctctttgggacaagttgttgaaatggttccg

SEQ ID NO: 2467 - DNA, 50 bp, Artificial Sequence
  Synthetic oligonucleotide
ttacagccgggcgcacagaacacaggatgcatatgctgcgggtgtgtgcg

SEQ ID NO: 2468 - DNA, 50 bp, Artificial Sequence
  Synthetic oligonucleotide
tcaaggccatgattgcatcgctctctggaacgaagatggccaggaattcg

SEQ ID NO: 2469 - DNA, 50 bp, Artificial Sequence
  Synthetic oligonucleotide
aggaataatgctaattagcgaggcttaatgagaacttcccccaggaagcg

SEQ ID NO: 2470 - DNA, 50 bp, Artificial Sequence
  Synthetic oligonucleotide
tggagggagccatgagcgactgccgtgcgggacgtctggaatgaggaccg

SEQ ID NO: 2471 - DNA, 50 bp, Artificial Sequence
  Synthetic oligonucleotide
ggccccgggcttccagagaagtgtgtcattatttgttttctgcaaagccg

SEQ ID NO: 2472 - DNA, 50 bp, Artificial Sequence
  Synthetic oligonucleotide
cgcacaccgtgccccacacgccctggtgccgcagctctacccggccctca

SEQ ID NO: 2473 - DNA, 50 bp, Artificial Sequence
  Synthetic oligonucleotide
acgtagacttaatcccgagaggcaattgttcccttgcttgggcggctacg

SEQ ID NO: 2474 - DNA, 50 bp, Artificial Sequence
  Synthetic oligonucleotide
acgggaagatgccgcgaggggcgtcattagggtaattgtgcccattaccg

SEQ ID NO: 2475 - DNA, 50 bp, Artificial Sequence
  Synthetic oligonucleotide
agtgaggtgtgtgtgacatattcatgtgaccacccgtgcagcgtcacgcg

SEQ ID NO: 2476 - DNA, 50 bp, Artificial Sequence
  Synthetic oligonucleotide
cgcccgcggcacagccccaccccgcgctgccgctgcctctgcccctgccg

SEQ ID NO: 2477 - DNA, 50 bp, Artificial Sequence
  Synthetic oligonucleotide
aattgagctgcccagaatccagggcggaagaggcccctgcagtgttctcg

SEQ ID NO: 2478 - DNA, 50 bp, Artificial Sequence
  Synthetic oligonucleotide
tcactggcgccctctatgtgggcggaaatcatccggcgaagatgaagacg

SEQ ID NO: 2479 - DNA, 50 bp, Artificial Sequence
  Synthetic oligonucleotide
ttacaagacaacatgtgtggccagccacccacttctactgtctctatccg

SEQ ID NO: 2480 - DNA, 50 bp, Artificial Sequence
  Synthetic oligonucleotide
cggggctccccagcactcagaccactagagccctcctcgtgattctgccg

SEQ ID NO: 2481 - DNA, 50 bp, Artificial Sequence
  Synthetic oligonucleotide
cgggaatcccaagtgaagtttaagccaattgttcaggttgtagagatgtc

SEQ ID NO: 2482 - DNA, 50 bp, Artificial Sequence
  Synthetic oligonucleotide
acatgacggtcgggcagctcaccccagactcagtgatggcgtggaagacg

SEQ ID NO: 2483 - DNA, 50 bp, Artificial Sequence
  Synthetic oligonucleotide
cgaggcgctccaggccggggtcttcccggctgctggcccctctcgctccc

SEQ ID NO: 2484 - DNA, 50 bp, Artificial Sequence
  Synthetic oligonucleotide
cgccgagtgcaaaagaggctgttactcggaattcggcatgaatgtggcct

SEQ ID NO: 2485 - DNA, 50 bp, Artificial Sequence
  Synthetic oligonucleotide
taagatatttggaaacctgtgttctgagttcttccttttccccgggctcg

SEQ ID NO: 2486 - DNA, 50 bp, Artificial Sequence
  Synthetic oligonucleotide
cgcgcagctgcgtctttgggacctggcaccgactaagccgctgcctctcc

SEQ ID NO: 2487 - DNA, 50 bp, Artificial Sequence
  Synthetic oligonucleotide
cgaacagcaacacgcataatagtaaaataagagcaggggctgcgcgcgag

SEQ ID NO: 2488 - DNA, 50 bp, Artificial Sequence
  Synthetic oligonucleotide
cgggtttgcgaaggatgcgggttttacttagtctcgctgagcctgttccg

SEQ ID NO: 2489 - DNA, 50 bp, Artificial Sequence
  Synthetic oligonucleotide
cgcttgttttcgcgatgcggccctcgattaacctgtctttgcctagcgca

SEQ ID NO: 2490 - DNA, 50 bp, Artificial Sequence
  Synthetic oligonucleotide
gactaacatatcatttttccctctctccccagggagtacatgttgtgccg

SEQ ID NO: 2491 - DNA, 50 bp, Artificial Sequence
  Synthetic oligonucleotide
cggccctgaaagatgccctatccatgagatgccttttcatctgcaaactc

SEQ ID NO: 2492 - DNA, 50 bp, Artificial Sequence
  Synthetic oligonucleotide
cctgggcctgggggcttcaaggagatgctcagattgacccttcctggtcg

SEQ ID NO: 2493 - DNA, 50 bp, Artificial Sequence
  Synthetic oligonucleotide
tgacatattggggcctcgacagcaaggttggcctctgtcccacaaggacg

SEQ ID NO: 2494 - DNA, 50 bp, Artificial Sequence
  Synthetic oligonucleotide
cggtcaaagcgccgcgcaaccagttattccgcccccggctccgcacccgc

SEQ ID NO: 2495 - DNA, 50 bp, Artificial Sequence
  Synthetic oligonucleotide
tgagctctccaaagcccactgccagttctcttcggggactaactgcaacg

SEQ ID NO: 2496 - DNA, 50 bp, Artificial Sequence
  Synthetic oligonucleotide
cgccctgccgcggaaacccttcccgtggcctcgaactggtccccgacgac

SEQ ID NO: 2497 - DNA, 50 bp, Artificial Sequence
  Synthetic oligonucleotide
cagttcgtgcgggtcgacagtgacgccgtgagtctgaggatgaagacgcg

SEQ ID NO: 2498 - DNA, 50 bp, Artificial Sequence
  Synthetic oligonucleotide
gtatactgaagccagctcttgccaaccctgagtgctgctggaaagcaccg

SEQ ID NO: 2499 - DNA, 50 bp, Artificial Sequence
  Synthetic oligonucleotide
cggccccggccccacaccagccctggcctcttgtctggtttaaatgatcg

SEQ ID NO: 2500 - DNA, 50 bp, Artificial Sequence
  Synthetic oligonucleotide
cgccgcttccccgcaccctcagggcgagggaagacttccctggctcacca

SEQ ID NO: 2501 - DNA, 50 bp, Artificial Sequence
  Synthetic oligonucleotide
cggggtcgctaagcaatgcggcactccctggcatccatcagccgcggctt

SEQ ID NO: 2502 - DNA, 50 bp, Artificial Sequence
  Synthetic oligonucleotide
aggacctcaaatgtctgcaggtgtcctcaaggctggggttcatggtgtcg

SEQ ID NO: 2503 - DNA, 50 bp, Artificial Sequence
  Synthetic oligonucleotide
caggagtgggagccgcacggcttggggaacgcgggagatcgcggattgcg

SEQ ID NO: 2504 - DNA, 50 bp, Artificial Sequence
  Synthetic oligonucleotide
cgccccatccagccgcatcccgggacccggtcgccaggacctcgccgctg

SEQ ID NO: 2505 - DNA, 50 bp, Artificial Sequence
  Synthetic oligonucleotide
cggccctctcctggcagcaagctcccagcggccagtctgaagccaattct

SEQ ID NO: 2506 - DNA, 50 bp, Artificial Sequence
  Synthetic oligonucleotide
agcaggtgcctctccgggcgaggcgctattggccgagggctggggcggcg

SEQ ID NO: 2507 - DNA, 50 bp, Artificial Sequence
  Synthetic oligonucleotide
gagcctgtttcaaacagaggcaggctgcttcctgaggaaccagcccctcg

SEQ ID NO: 2508 - DNA, 50 bp, Artificial Sequence
  Synthetic oligonucleotide
cgccggttctggaaccaggttttgacctgcgcatcggtcattttgagcgc

SEQ ID NO: 2509 - DNA, 50 bp, Artificial Sequence
  Synthetic oligonucleotide
cgcaggccatggggagccccgctaccgtgagcaccacccacgccgtcccc

SEQ ID NO: 2510 - DNA, 50 bp, Artificial Sequence
  Synthetic oligonucleotide
gggaggttagtccaggggagcgacgcccgatcgctgacgagagaggatcg

SEQ ID NO: 2511 - DNA, 50 bp, Artificial Sequence
  Synthetic oligonucleotide
acagtcacgtgggacaggggcgtccgaaggtgccggctcggatgggctcg

SEQ ID NO: 2512 - DNA, 50 bp, Artificial Sequence
  Synthetic oligonucleotide
acctgagcagcggtcaccacagtaacgaattcgctgccagtggagtctcg

SEQ ID NO: 2513 - DNA, 50 bp, Artificial Sequence
  Synthetic oligonucleotide
gtccaaaccaaattatctccctgtggttccttgggcttcatccgacaacg

SEQ ID NO: 2514 - DNA, 50 bp, Artificial Sequence
  Synthetic oligonucleotide
cgcagaaaggacacagtgacatgtagtgtaagtgactggcacctttctga

SEQ ID NO: 2515 - DNA, 50 bp, Artificial Sequence
  Synthetic oligonucleotide
attgcatcttgcaacattcggagcgtggccccagatacagagaacaggcg

SEQ ID NO: 2516 - DNA, 50 bp, Artificial Sequence
  Synthetic oligonucleotide
gtgatcataagcccatggtgggcagaggccctatggagccaagggctccg

SEQ ID NO: 2517 - DNA, 50 bp, Artificial Sequence
  Synthetic oligonucleotide
cggtcctagccaagctgaaaaaacgtctcggatttcgcggacagcggcct

SEQ ID NO: 2518 - DNA, 50 bp, Artificial Sequence
  Synthetic oligonucleotide
cgcgccaaaggcatttgatccaaccccgctccagcctacagtggcccgac

SEQ ID NO: 2519 - DNA, 50 bp, Artificial Sequence
  Synthetic oligonucleotide
atttttattgctgccagggacctcaccgggggcagtgctggcactgctcg

SEQ ID NO: 2520 - DNA, 50 bp, Artificial Sequence
  Synthetic oligonucleotide
cgatctcgccgtggaggcatggattccaaccctccagtgacggtcgtatt

SEQ ID NO: 2521 - DNA, 50 bp, Artificial Sequence
  Synthetic oligonucleotide
tccagatgaaaacctacctaatccatcaaacagtgtctactctaaacacg

SEQ ID NO: 2522 - DNA, 50 bp, Artificial Sequence
  Synthetic oligonucleotide
tttaatttaaattcagagttagccggagccatttcccccctctagaagcg

SEQ ID NO: 2523 - DNA, 50 bp, Artificial Sequence
  Synthetic oligonucleotide
gagcccagctccggctagttttcccgggggcaggtgtagccttgggcgcg

SEQ ID NO: 2524 - DNA, 50 bp, Artificial Sequence
  Synthetic oligonucleotide
gcttgccgagtcccaagcaggcaggtgagctggagggcggggatgtcccg

SEQ ID NO: 2525 - DNA, 50 bp, Artificial Sequence
  Synthetic oligonucleotide
accagcacgtatgttttatcagaatggccttgagaaaacgaaagcacacg

SEQ ID NO: 2526 - DNA, 50 bp, Artificial Sequence
  Synthetic oligonucleotide
tggggctgaggcctcgggctagggaaggcgccaaggtggattcgggcccg

SEQ ID NO: 2527 - DNA, 50 bp, Artificial Sequence
  Synthetic oligonucleotide
atagatgtggacaagagaacatcttttacatctccacagctttcaactcg

SEQ ID NO: 2528 - DNA, 50 bp, Artificial Sequence
  Synthetic oligonucleotide
cggatgcgcgccttaacagttgtccgtttagcaggaggttttgagctccc

SEQ ID NO: 2529 - DNA, 50 bp, Artificial Sequence
  Synthetic oligonucleotide
aaaggaatcagggtattttgctggaaggatggctgccgaggcctaccacg

SEQ ID NO: 2530 - DNA, 50 bp, Artificial Sequence
  Synthetic oligonucleotide
cgagtaccccttgcttgtcgaggcaacaaagaggagcttttaaatggaag

SEQ ID NO: 2531 - DNA, 50 bp, Artificial Sequence
  Synthetic oligonucleotide
agtctcgctctctcccattcattatctttagctctcgggtcctggaagcg

SEQ ID NO: 2532 - DNA, 50 bp, Artificial Sequence
  Synthetic oligonucleotide
gtgacccacaaaggccggaagcggccacggggggtctaagaaccagcccg

SEQ ID NO: 2533 - DNA, 50 bp, Artificial Sequence
  Synthetic oligonucleotide
aggagaaggcacctaggagaaacgtcttagggagtagtcccgcgggtccg

SEQ ID NO: 2534 - DNA, 50 bp, Artificial Sequence
  Synthetic oligonucleotide
ggttttcaaatgggcccccgaggcctgggagatccccgagtagccacgcg

SEQ ID NO: 2535 - DNA, 50 bp, Artificial Sequence
  Synthetic oligonucleotide
cgacaggagttaccatgtttcaggacagctttctgccctgatatggtttg

SEQ ID NO: 2536 - DNA, 50 bp, Artificial Sequence
  Synthetic oligonucleotide
actgtggggactgcctgcgaaacgccttggaggccgctgtgtgagctgcg

SEQ ID NO: 2537 - DNA, 50 bp, Artificial Sequence
  Synthetic oligonucleotide
cgcctgtgcctctccaactgcttggccgtcttccgtctcggcctcctgct

SEQ ID NO: 2538 - DNA, 50 bp, Artificial Sequence
  Synthetic oligonucleotide
tttgctgatggctgagggcttggccagccaccggcccgcctgggacgccg

SEQ ID NO: 2539 - DNA, 50 bp, Artificial Sequence
  Synthetic oligonucleotide
cgcacagctcctccgcaggctcgcccagggccagcagcagctccacgcac

SEQ ID NO: 2540 - DNA, 50 bp, Artificial Sequence
  Synthetic oligonucleotide
cggggcaccctgatcagtttcctcaggttcagccaaggcctctgtggttc

SEQ ID NO: 2541 - DNA, 50 bp, Artificial Sequence
  Synthetic oligonucleotide
cgggatcctagggaaggcagccacaatggagatccctatccacgggaacg

SEQ ID NO: 2542 - DNA, 50 bp, Artificial Sequence
  Synthetic oligonucleotide
cgccacggaaacccaaacagaactccgtggggagcgagggtctcacctgc

SEQ ID NO: 2543 - DNA, 50 bp, Artificial Sequence
  Synthetic oligonucleotide
cgccttaccccaaaagaacaggcaagagaacttcaccaataggtaagggc

SEQ ID NO: 2544 - DNA, 50 bp, Artificial Sequence
  Synthetic oligonucleotide
aggattcacgggcctgtaggggctcagacttcaaattgaaccgcgcctcg

SEQ ID NO: 2545 - DNA, 50 bp, Artificial Sequence
  Synthetic oligonucleotide
tcattttaacgtgcgcaggtcagcgatgggctgaacgttccttaaaatcg

SEQ ID NO: 2546 - DNA, 50 bp, Artificial Sequence
  Synthetic oligonucleotide
aaacctggttccagaaccggcggacaaagtggaggtgagcaagcggggcg

SEQ ID NO: 2547 - DNA, 50 bp, Artificial Sequence
  Synthetic oligonucleotide
agtagccaccatttggttaacagacatgaaaacaaaccttctgacactcg

SEQ ID NO: 2548 - DNA, 50 bp, Artificial Sequence
  Synthetic oligonucleotide
cgcctcccccacctgcgcgaaggcgaggaggtcccacctgcctcagctgt

SEQ ID NO: 2549 - DNA, 50 bp, Artificial Sequence
  Synthetic oligonucleotide
ggagtgggtggcggcgtccgtgggcggccgggagcctggcgtgggtggcg

SEQ ID NO: 2550 - DNA, 50 bp, Artificial Sequence
  Synthetic oligonucleotide
cgcccccgggacccagctctttccggcttctttgcaaaaggatagaaccg

SEQ ID NO: 2551 - DNA, 50 bp, Artificial Sequence
  Synthetic oligonucleotide
tgacagcagtgtttcttgaatagggtgacacttcagccagggcatttgcg

SEQ ID NO: 2552 - DNA, 50 bp, Artificial Sequence
  Synthetic oligonucleotide
tattaccttagccatctccttattccatgctgactgctgaagccaaatcg

SEQ ID NO: 2553 - DNA, 50 bp, Artificial Sequence
  Synthetic oligonucleotide
cggccaccccgtgattttctctgaaaactgcgacagactcgcagcctgcc

SEQ ID NO: 2554 - DNA, 50 bp, Artificial Sequence
  Synthetic oligonucleotide
aactttggaccagcctgtttcactccaaagcctttggggctcaagcttcg

SEQ ID NO: 2555 - DNA, 50 bp, Artificial Sequence
  Synthetic oligonucleotide
cgtgctgagaaaggctgtgactaaattagtaagattttctttaattacta

SEQ ID NO: 2556 - DNA, 50 bp, Artificial Sequence
  Synthetic oligonucleotide
cgccaggactcaccccggctctccacctccgctgggggtttcaggttctg

SEQ ID NO: 2557 - DNA, 50 bp, Artificial Sequence
  Synthetic oligonucleotide
cgggttccactaactttatctcctgaggaatgcctcaggaatgctacaag

SEQ ID NO: 2558 - DNA, 50 bp, Artificial Sequence
  Synthetic oligonucleotide
gtctccttgctactgaggctctctttcctttgatccagatggtgtggtcg

SEQ ID NO: 2559 - DNA, 50 bp, Artificial Sequence
  Synthetic oligonucleotide
ggcaggaggaacggccgtgccccaggccagcgtgctgagaaaaggttccg

SEQ ID NO: 2560 - DNA, 50 bp, Artificial Sequence
  Synthetic oligonucleotide
gggatggcaacttgacaccacaaagtatggttctattggcttagccagcg

SEQ ID NO: 2561 - DNA, 50 bp, Artificial Sequence
  Synthetic oligonucleotide
cggttggtccttcactgagatcccaaagatcgaagtcctgggcctactgc

SEQ ID NO: 2562 - DNA, 50 bp, Artificial Sequence
  Synthetic oligonucleotide
ttgtgcttcctctcggtgggcaggatttcagcggagttgcgggggacacg

SEQ ID NO: 2563 - DNA, 50 bp, Artificial Sequence
  Synthetic oligonucleotide
tggggagtcagcgaggacggtggggccaggagcccttgggagggcctacg

SEQ ID NO: 2564 - DNA, 50 bp, Artificial Sequence
  Synthetic oligonucleotide
cggaatatccatagaaaaaaattccaagaatgtttggagagcaacgcatg

SEQ ID NO: 2565 - DNA, 50 bp, Artificial Sequence
  Synthetic oligonucleotide
cgcttcctggcatgggggtcgaatcatgtcgataaaatgggctcggtttc

SEQ ID NO: 2566 - DNA, 50 bp, Artificial Sequence
  Synthetic oligonucleotide
cgatgtgaagcacattctgcgactccgctggaaactcttcagccacccgt

SEQ ID NO: 2567 - DNA, 50 bp, Artificial Sequence
  Synthetic oligonucleotide
cgacaggtgagaacaatgacaagggatccacactgtcaggaatctcatta

SEQ ID NO: 2568 - DNA, 50 bp, Artificial Sequence
  Synthetic oligonucleotide
aaatctccgacgacgtgacggctgctgcggtggggagccggggaggctcg

SEQ ID NO: 2569 - DNA, 50 bp, Artificial Sequence
  Synthetic oligonucleotide
gcggggtggtagcggctttgagcgggtgagaaaagctcaggtggggcccg

SEQ ID NO: 2570 - DNA, 50 bp, Artificial Sequence
  Synthetic oligonucleotide
cgcccctcaagacctggccttagcctaatctcagggtttgccccaccccg

SEQ ID NO: 2571 - DNA, 50 bp, Artificial Sequence
  Synthetic oligonucleotide
cggcatccttgggcacgcacagtaagtttggcagttaaacacgttagcgg

SEQ ID NO: 2572 - DNA, 50 bp, Artificial Sequence
  Synthetic oligonucleotide
attttagcaccctgcaaacaagtcctgagagggcaagcaagctgctgacg

SEQ ID NO: 2573 - DNA, 50 bp, Artificial Sequence
  Synthetic oligonucleotide
cgtgatgcagtatggcccccgggaggccgcccccagattctagaggggct

SEQ ID NO: 2574 - DNA, 50 bp, Artificial Sequence
  Synthetic oligonucleotide
cgtggcccccggcccctgcccacccaccccccaggtcagcgtcgcaagag

SEQ ID NO: 2575 - DNA, 50 bp, Artificial Sequence
  Synthetic oligonucleotide
cgtggattttgcaaaaccgtcatgttctcaaaaggagaccaacagctgaa

SEQ ID NO: 2576 - DNA, 50 bp, Artificial Sequence
  Synthetic oligonucleotide
cgggcatcttacactgtgagtagctgtggtttttttcaagatcgaaagtt

SEQ ID NO: 2577 - DNA, 50 bp, Artificial Sequence
  Synthetic oligonucleotide
cggcccagagtttgacccctcctagcgagttcttcccggccagctgccca

SEQ ID NO: 2578 - DNA, 50 bp, Artificial Sequence
  Synthetic oligonucleotide
gggagacaaagggctatttcgctgttacttcaaagagcattaaagcctcg

SEQ ID NO: 2579 - DNA, 50 bp, Artificial Sequence
  Synthetic oligonucleotide
cattcctttgtatgcgcggggcgctgcgtgtctgagctggcgtccttgcg

SEQ ID NO: 2580 - DNA, 50 bp, Artificial Sequence
  Synthetic oligonucleotide
cgggctgccccgcgcagagcagctccacctgtccctcacctacgctcccg

SEQ ID NO: 2581 - DNA, 50 bp, Artificial Sequence
  Synthetic oligonucleotide
ctaaaacctcaccagaaccgcgcggaagtgagaagtcgcggccaaaggcg

SEQ ID NO: 2582 - DNA, 50 bp, Artificial Sequence
  Synthetic oligonucleotide
cgtggaggatgacatagcagtgttcctcaaaaaagttcccgtaagccccc

SEQ ID NO: 2583 - DNA, 50 bp, Artificial Sequence
  Synthetic oligonucleotide
gactcatgcgtgtgtggtaggaatcttccaggaagtccccgtcccgttcg

SEQ ID NO: 2584 - DNA, 50 bp, Artificial Sequence
  Synthetic oligonucleotide
cgcagctctccggataggccgccatcgcttcggcttggccctgcctctca

SEQ ID NO: 2585 - DNA, 50 bp, Artificial Sequence
  Synthetic oligonucleotide
cctttcctggttatggccggtagctgtctccagggctaacgtgggcagcg

SEQ ID NO: 2586 - DNA, 50 bp, Artificial Sequence
  Synthetic oligonucleotide
cgcaaagggctctctccgacttggaaagtgcagggatcccaagaatatca

SEQ ID NO: 2587 - DNA, 50 bp, Artificial Sequence
  Synthetic oligonucleotide
cgccaggacaccccccaaatgcgcgccctggcactcgtgctgcgtcctgt

SEQ ID NO: 2588 - DNA, 50 bp, Artificial Sequence
  Synthetic oligonucleotide
tcactcttatcagactccaagaatttaaccaaaccagacaatctaatgcg

SEQ ID NO: 2589 - DNA, 50 bp, Artificial Sequence
  Synthetic oligonucleotide
cagggaagccctagggggccggatgtgatgctgctgacttgtgcattgcg

SEQ ID NO: 2590 - DNA, 50 bp, Artificial Sequence
  Synthetic oligonucleotide
ttcgtcctgatcactccatctaaaaaactggtgttcccataagaattacg

SEQ ID NO: 2591 - DNA, 50 bp, Artificial Sequence
  Synthetic oligonucleotide
cgccgcgccctggccaagcaacccgcacaccactgactggggatccgggc

SEQ ID NO: 2592 - DNA, 50 bp, Artificial Sequence
  Synthetic oligonucleotide
cgccagtcgtcccctggatgctcctgggccgactttaacccctggcttcc

SEQ ID NO: 2593 - DNA, 50 bp, Artificial Sequence
  Synthetic oligonucleotide
aactccgagattggtaacaaatgccacaaattcactgtgtcccctgctcg

SEQ ID NO: 2594 - DNA, 50 bp, Artificial Sequence
  Synthetic oligonucleotide
ggcgcccgggtccgcagggtaggtggagtctgcggtggaagatggagccg

SEQ ID NO: 2595 - DNA, 50 bp, Artificial Sequence
  Synthetic oligonucleotide
tagtattcttttatatttctttcattgggcactttcccatctccaactcg

SEQ ID NO: 2596 - DNA, 50 bp, Artificial Sequence
  Synthetic oligonucleotide
ctggagagggccaggcaagggcacagcgggtcttgtcctccactccttcg

SEQ ID NO: 2597 - DNA, 50 bp, Artificial Sequence
  Synthetic oligonucleotide
gcaggggctggtaccaacttggcggttctcggaggggcggggcaggggcg

SEQ ID NO: 2598 - DNA, 50 bp, Artificial Sequence
  Synthetic oligonucleotide
aatccgaagcccaaggaaccagatgcattggcaactgttaatcgcagccg

SEQ ID NO: 2599 - DNA, 50 bp, Artificial Sequence
  Synthetic oligonucleotide
cggcatctgtgcaggagggtctccgcagaaaaaacccaggacccacgacc

SEQ ID NO: 2600 - DNA, 50 bp, Artificial Sequence
  Synthetic oligonucleotide
ggtgtccgccacagactgagctttctttccccacaaaacattgtttttcg

SEQ ID NO: 2601 - DNA, 50 bp, Artificial Sequence
  Synthetic oligonucleotide
ctcccgcctggatcaaattcaggtgactaagcgcgtctgcgagggaggcg

SEQ ID NO: 2602 - DNA, 50 bp, Artificial Sequence
  Synthetic oligonucleotide
cgcaccctggtctgcttgaggacgcctcttttcacactgacaaggtccag

SEQ ID NO: 2603 - DNA, 50 bp, Artificial Sequence
  Synthetic oligonucleotide
cggataatcccggtcctgagccccagcggccagtctcctttacatatgaa

SEQ ID NO: 2604 - DNA, 50 bp, Artificial Sequence
  Synthetic oligonucleotide
cgaaagcccgtccacatcaactcaccctgggcaatgacgtcttcaatgtt

SEQ ID NO: 2605 - DNA, 50 bp, Artificial Sequence
  Synthetic oligonucleotide
cgctcgcccgacagcatagtacttgccgcccagccacgcccgcgcgccag

SEQ ID NO: 2606 - DNA, 50 bp, Artificial Sequence
  Synthetic oligonucleotide
cggagcctgggctttaaggactggatgaccagtgggatccagtcttcaag

SEQ ID NO: 2607 - DNA, 50 bp, Artificial Sequence
  Synthetic oligonucleotide
cgcgccccaccctcagccgcccccaggcagcctgcacgacccagctcctg

SEQ ID NO: 2608 - DNA, 50 bp, Artificial Sequence
  Synthetic oligonucleotide
cacctgcggaggcctgtggcgagtgccgagctgaacccacacctggaacg

SEQ ID NO: 2609 - DNA, 50 bp, Artificial Sequence
  Synthetic oligonucleotide
cgggggatgaagacactgctgccatggacagcccgtgccagccgcagccc

SEQ ID NO: 2610 - DNA, 50 bp, Artificial Sequence
  Synthetic oligonucleotide
cgccccagcccgtcctggctgccacccgccgtccctgagaaacgctcaga

SEQ ID NO: 2611 - DNA, 50 bp, Artificial Sequence
  Synthetic oligonucleotide
tatcgacatgattcgacccccatgccaggaagcgtgctctcacagaagcg

SEQ ID NO: 2612 - DNA, 50 bp, Artificial Sequence
  Synthetic oligonucleotide
tccccggagttacagtcggaacaaacttgccgagtcttgcagcgcaagcg

SEQ ID NO: 2613 - DNA, 50 bp, Artificial Sequence
  Synthetic oligonucleotide
ccttatgaacctggaggtattgtgcttcccacatcacagcagcagacacg

SEQ ID NO: 2614 - DNA, 50 bp, Artificial Sequence
  Synthetic oligonucleotide
cggcccatctctcaattttcaatccagcagtttgtacacggctggtttaa

SEQ ID NO: 2615 - DNA, 50 bp, Artificial Sequence
  Synthetic oligonucleotide
actagaccgaccattaaatctccagaaaaggcccaagtctaaagtctgcg

SEQ ID NO: 2616 - DNA, 50 bp, Artificial Sequence
  Synthetic oligonucleotide
cttagctgttttagtctcctctgcgcgccaggggctgggagggcggagcg

SEQ ID NO: 2617 - DNA, 50 bp, Artificial Sequence
  Synthetic oligonucleotide
ctcgagttccgcggatggcctggaacccgcaattggaggagttgagagcg

SEQ ID NO: 2618 - DNA, 50 bp, Artificial Sequence
  Synthetic oligonucleotide
cttagtcgccaacccacctcatctcaggatgaatttcagtgtacttgacg

SEQ ID NO: 2619 - DNA, 50 bp, Artificial Sequence
  Synthetic oligonucleotide
cgcacacacaagggctaaggatgtaccagagaagagcatacgtaattatg

SEQ ID NO: 2620 - DNA, 50 bp, Artificial Sequence
  Synthetic oligonucleotide
ccccgactgctgggctgcctcctcgggcaggtgtgagactgcaggggacg

SEQ ID NO: 2621 - DNA, 50 bp, Artificial Sequence
  Synthetic oligonucleotide
ggtacctcacagacccttctccaaagtctggcgggccttggggtttttcg

SEQ ID NO: 2622 - DNA, 50 bp, Artificial Sequence
  Synthetic oligonucleotide
cgaagtttctcaaacgaattcctaagaaatagagcccagcaagagagccc

SEQ ID NO: 2623 - DNA, 50 bp, Artificial Sequence
  Synthetic oligonucleotide
cgggacaagctcttcggcttctgcccgacccgaggtacctccaccctgtc

SEQ ID NO: 2624 - DNA, 50 bp, Artificial Sequence
  Synthetic oligonucleotide
ccgacaacgtcactgtgatggtggtgcggatagggcactgaggggtggcg

SEQ ID NO: 2625 - DNA, 50 bp, Artificial Sequence
  Synthetic oligonucleotide
cctctcaatttctgcatattcatccctacatgagtgcagctggaagaacg

SEQ ID NO: 2626 - DNA, 50 bp, Artificial Sequence
  Synthetic oligonucleotide
gggtctcaagacagctacgaggggctggcaccgggaggctttggctaacg

SEQ ID NO: 2627 - DNA, 50 bp, Artificial Sequence
  Synthetic oligonucleotide
ggacccaagttcaagttccctcctctccaaactcatctgttctggtcccg

SEQ ID NO: 2628 - DNA, 50 bp, Artificial Sequence
  Synthetic oligonucleotide
tctctggccaacactgggctcagaggccctttctttaaccttagatctcg

SEQ ID NO: 2629 - DNA, 50 bp, Artificial Sequence
  Synthetic oligonucleotide
tccgaggcaattgtgtcaatgagctattcaaagacaaaaatagtatgacg

SEQ ID NO: 2630 - DNA, 50 bp, Artificial Sequence
  Synthetic oligonucleotide
cgccccctgaagtttactagagctctgtgttttgagactcaagaagcgcg

SEQ ID NO: 2631 - DNA, 50 bp, Artificial Sequence
  Synthetic oligonucleotide
cgtggtggattcgctttacttatgacgaatcattcacggacaacactttt

SEQ ID NO: 2632 - DNA, 50 bp, Artificial Sequence
  Synthetic oligonucleotide
cgacaccaactggcagatgatgttgtgttaacccagcagcagatctgcaa

SEQ ID NO: 2633 - DNA, 50 bp, Artificial Sequence
  Synthetic oligonucleotide
cggcctccatgcttctggacacacacacgcttctctgaagggccagctgg

SEQ ID NO: 2634 - DNA, 50 bp, Artificial Sequence
  Synthetic oligonucleotide
cgcgctaaataacgacctcacggagaagccgtccccgagcccaccaacat

SEQ ID NO: 2635 - DNA, 50 bp, Artificial Sequence
  Synthetic oligonucleotide
cgggatccccggagcctgccgtcctttgttgaaattaccctctgcccaat

SEQ ID NO: 2636 - DNA, 50 bp, Artificial Sequence
  Synthetic oligonucleotide
cgcaaactacagcaggatatgcggaaagcaacaaaaagagtcccccagca

SEQ ID NO: 2637 - DNA, 50 bp, Artificial Sequence
  Synthetic oligonucleotide
ttggaggagagcgcaggagcggaggctgcggtgggagccactttcccccg

SEQ ID NO: 2638 - DNA, 50 bp, Artificial Sequence
  Synthetic oligonucleotide
cgcggtccccgagtgtgcgacaaatggtactcttgcaacttcctggggcc

SEQ ID NO: 2639 - DNA, 50 bp, Artificial Sequence
  Synthetic oligonucleotide
cgtgaggtgaccctcacccaagcctttcatgtgtttggcatgcttaattt

SEQ ID NO: 2640 - DNA, 50 bp, Artificial Sequence
  Synthetic oligonucleotide
gctaacactgcctgaggcacctctgcttttgaagtcgccggggattagcg

SEQ ID NO: 2641 - DNA, 50 bp, Artificial Sequence
  Synthetic oligonucleotide
cgctgagggcggtgagcgagggcgccaaggcacaggtggggcgggagtcg

SEQ ID NO: 2642 - DNA, 50 bp, Artificial Sequence
  Synthetic oligonucleotide
cgggctcagacctgattctgattcttctacctgagaactgcggagttgtt

SEQ ID NO: 2643 - DNA, 50 bp, Artificial Sequence
  Synthetic oligonucleotide
cgcagccaggtggggcacagctgatgcaaaaggagctaactaggtgcaaa

SEQ ID NO: 2644 - DNA, 50 bp, Artificial Sequence
  Synthetic oligonucleotide
gctggttgctgctcacaggcagagaaacgctggtatgcatttgggtgtcg

SEQ ID NO: 2645 - DNA, 50 bp, Artificial Sequence
  Synthetic oligonucleotide
tatacatcactaccgcattcccccgaataggggagcccctcagcatttcg

SEQ ID NO: 2646 - DNA, 50 bp, Artificial Sequence
  Synthetic oligonucleotide
gcccgtgtcgctaccattcggacaaaacgcacatcaaattgcagaattcg

SEQ ID NO: 2647 - DNA, 50 bp, Artificial Sequence
  Synthetic oligonucleotide
cgaaaccctacgccattacagagttctagtgtgggctacctgttgggaca

SEQ ID NO: 2648 - DNA, 50 bp, Artificial Sequence
  Synthetic oligonucleotide
cgcggagcgaatggtgtgccaaggaagcaagaaactcccaccaaagcgac

SEQ ID NO: 2649 - DNA, 50 bp, Artificial Sequence
  Synthetic oligonucleotide
cggaggtagctggaccgaagcaaaagatcgagcctccggtttggctactt

SEQ ID NO: 2650 - DNA, 50 bp, Artificial Sequence
  Synthetic oligonucleotide
cgcagagcacagcgctccaggtgcgcactcggggccagcactgttcccca

SEQ ID NO: 2651 - DNA, 50 bp, Artificial Sequence
  Synthetic oligonucleotide
cgctttgtgttgctggaccttaagaactgacacacttattcacagtcagc

SEQ ID NO: 2652 - DNA, 50 bp, Artificial Sequence
  Synthetic oligonucleotide
gacgtcatactatttttgtctttgaatagctcattgacacaattgcctcg

SEQ ID NO: 2653 - DNA, 50 bp, Artificial Sequence
  Synthetic oligonucleotide
cggctcccagtgcgcgcgcataccacatttccacaaacgtgtgttacaaa

SEQ ID NO: 2654 - DNA, 50 bp, Artificial Sequence
  Synthetic oligonucleotide
cggaagacccaggaccttcctatgctacacccaaagccattgagaacggg

SEQ ID NO: 2655 - DNA, 50 bp, Artificial Sequence
  Synthetic oligonucleotide
cgcggtcctccactgggtagggggcgctccaagacagggactcttctagc

SEQ ID NO: 2656 - DNA, 50 bp, Artificial Sequence
  Synthetic oligonucleotide
gtggaagtagttggccccccggcctcgagcggggtggatgaatagctccg

SEQ ID NO: 2657 - DNA, 50 bp, Artificial Sequence
  Synthetic oligonucleotide
cggtcagaaagttgaagttccacagccactgagttggtaggtaccacagt

SEQ ID NO: 2658 - DNA, 50 bp, Artificial Sequence
  Synthetic oligonucleotide
aatttcctggtagagacaggagttgtcctgggcccctgacatcccagccg

SEQ ID NO: 2659 - DNA, 50 bp, Artificial Sequence
  Synthetic oligonucleotide
cggacccctgcgggaaaaccagacacttctgtttcgtggctttcgggctg

SEQ ID NO: 2660 - DNA, 50 bp, Artificial Sequence
  Synthetic oligonucleotide
cgcctaggacccgacactgcagctgtccgttcttgccagagtcccggtca

SEQ ID NO: 2661 - DNA, 50 bp, Artificial Sequence
  Synthetic oligonucleotide
cggggcgcctggaccccactcgcctccatcttgctgctgctgcttgggcc

SEQ ID NO: 2662 - DNA, 50 bp, Artificial Sequence
  Synthetic oligonucleotide
agagttccaggcaattccgggggctgccccacagaagcaggtggggatcg

SEQ ID NO: 2663 - DNA, 50 bp, Artificial Sequence
  Synthetic oligonucleotide
gtcacctggggagtcgaaaatactgaaatcctgcgaaattccctgttgcg

SEQ ID NO: 2664 - DNA, 50 bp, Artificial Sequence
  Synthetic oligonucleotide
cgtgcaggccccgtccaccctcggcactgcccgcacccacggcccacctg

SEQ ID NO: 2665 - DNA, 50 bp, Artificial Sequence
  Synthetic oligonucleotide
cgcgaaggcaccccacgctcctagaaaagagcacgacgcacccgatgctc

SEQ ID NO: 2666 - DNA, 50 bp, Artificial Sequence
  Synthetic oligonucleotide
gcccggggagtcggccggccagggaagctagtcggcttggtgtagacccg

SEQ ID NO: 2667 - DNA, 50 bp, Artificial Sequence
  Synthetic oligonucleotide
ggtttgttcagtccctaggcacggcaatcaggaaactctctgcacttgcg

SEQ ID NO: 2668 - DNA, 50 bp, Artificial Sequence
  Synthetic oligonucleotide
ctcgcggctcggcgggtctagggacttcgggttcctgaatgtcaaaggcg

SEQ ID NO: 2669 - DNA, 50 bp, Artificial Sequence
  Synthetic oligonucleotide
cgggcctattctctacacacaagtaggggccgacaggcttgagcgccctc

SEQ ID NO: 2670 - DNA, 50 bp, Artificial Sequence
  Synthetic oligonucleotide
cggtggagttgaggtgacatttcactggcatggagacctgaaaccaaaag

SEQ ID NO: 2671 - DNA, 50 bp, Artificial Sequence
  Synthetic oligonucleotide
cggatattacggaaacacttggaagctgaacatcagcccgaggactcact

SEQ ID NO: 2672 - DNA, 50 bp, Artificial Sequence
  Synthetic oligonucleotide
cgcgcctcccggctccactggcgacgctggagctcttggccgcttccctt

SEQ ID NO: 2673 - DNA, 50 bp, Artificial Sequence
  Synthetic oligonucleotide
ggtgggagctccgaaggggtgccggggcggtgatcgggaggtctccagcg

SEQ ID NO: 2674 - DNA, 50 bp, Artificial Sequence
  Synthetic oligonucleotide
cgccaagggtcaagcacagtgcttggttcacagaaaggggttcaatattt

SEQ ID NO: 2675 - DNA, 50 bp, Artificial Sequence
  Synthetic oligonucleotide
gcggagggtggtgggctccgagtcccgggcgagggcgcggaagatgctcg

SEQ ID NO: 2676 - DNA, 50 bp, Artificial Sequence
  Synthetic oligonucleotide
attcagctgacagtgtccgctttcggcggggtgtggaatgggccagagcg

SEQ ID NO: 2677 - DNA, 50 bp, Artificial Sequence
  Synthetic oligonucleotide
gaggggtacacacatttctgaaactactaaaatactcacctcctgggacg

SEQ ID NO: 2678 - DNA, 50 bp, Artificial Sequence
  Synthetic oligonucleotide
ggcggcgggcggctcgggttatctgagccgcttggtgttgggtggctgcg

SEQ ID NO: 2679 - DNA, 50 bp, Artificial Sequence
  Synthetic oligonucleotide
atcaataaaatgctcactgaaaacaagttacaaaagcaatttggagagcg

SEQ ID NO: 2680 - DNA, 50 bp, Artificial Sequence
  Synthetic oligonucleotide
aggaactcttgaggccctcggagagcagttagggaccgcaggctgccgcg

SEQ ID NO: 2681 - DNA, 50 bp, Artificial Sequence
  Synthetic oligonucleotide
acaatgcctccgggctgcgcgaggttgataagggagcagcaccgagctcg

SEQ ID NO: 2682 - DNA, 50 bp, Artificial Sequence
  Synthetic oligonucleotide
cggggaacacgtgtagcctccggagacctaggggtccatcgctcctcccc

SEQ ID NO: 2683 - DNA, 50 bp, Artificial Sequence
  Synthetic oligonucleotide
cggagttccgcaactctccccagacgtccggaagcaaatcgcgtcccagg

SEQ ID NO: 2684 - DNA, 50 bp, Artificial Sequence
  Synthetic oligonucleotide
gctctcggctgcacttgggcaagagatagctggagctatcgccgcctgcg

SEQ ID NO: 2685 - DNA, 50 bp, Artificial Sequence
  Synthetic oligonucleotide
cgtcacctgaggggggcacttccggtctcgtgccgccttcccaggaccct

SEQ ID NO: 2686 - DNA, 50 bp, Artificial Sequence
  Synthetic oligonucleotide
gggagctgcagagctacgcagccttcggtgcagtcgtcactcgtgtctcg

SEQ ID NO: 2687 - DNA, 50 bp, Artificial Sequence
  Synthetic oligonucleotide
cgggcgctcctgtggtagagggactggaacactgtcccatgttgagtgaa

SEQ ID NO: 2688 - DNA, 50 bp, Artificial Sequence
  Synthetic oligonucleotide
cgcccctcgccagcgcgctcgcagcccatcggctcctgccggggcccctc

SEQ ID NO: 2689 - DNA, 50 bp, Artificial Sequence
  Synthetic oligonucleotide
cttccaaatcaaagttaaccaaaacagcttcagaagatgcccatggatcg

SEQ ID NO: 2690 - DNA, 50 bp, Artificial Sequence
  Synthetic oligonucleotide
cgccccggcctctcctgatagcacctggcacctgcgtgaagtatccctac

SEQ ID NO: 2691 - DNA, 50 bp, Artificial Sequence
  Synthetic oligonucleotide
cgtcagtttttttgaaaagccactttaggaatagaccaaaggggctggtg

SEQ ID NO: 2692 - DNA, 50 bp, Artificial Sequence
  Synthetic oligonucleotide
ttttcaagtgccttaattggctactcccctccgcggggaattgggcgccg

SEQ ID NO: 2693 - DNA, 50 bp, Artificial Sequence
  Synthetic oligonucleotide
cgcgttcatcctgctcctcgctcgccagctcccgtgcgggggctctaagc

SEQ ID NO: 2694 - DNA, 50 bp, Artificial Sequence
  Synthetic oligonucleotide
cggacgtcttttgactgggttcaggtcacactactcccaaaatacgacac

SEQ ID NO: 2695 - DNA, 50 bp, Artificial Sequence
  Synthetic oligonucleotide
cggccttctgcagcgactggcgctggctgcgcgctcccatcacaatcccc

SEQ ID NO: 2696 - DNA, 50 bp, Artificial Sequence
  Synthetic oligonucleotide
cgagggaaaatgagacttccccacaggttaataaacaacctgtccggcac

SEQ ID NO: 2697 - DNA, 50 bp, Artificial Sequence
  Synthetic oligonucleotide
caggccgcgtgaagtgagaaacggtttgcggtgtcctccgcggagtgccg

SEQ ID NO: 2698 - DNA, 50 bp, Artificial Sequence
  Synthetic oligonucleotide
tgtcccctcttacttgttctgtctttctctctctcgctttaaaggtgtcg

SEQ ID NO: 2699 - DNA, 50 bp, Artificial Sequence
  Synthetic oligonucleotide
cggttcttgctcacgagttccaaacagttaaagtgacgttggcaaggccg

SEQ ID NO: 2700 - DNA, 50 bp, Artificial Sequence
  Synthetic oligonucleotide
cggggctccaggctggtgcttgtgctgagaatgactgcgggaggggctcg

SEQ ID NO: 2701 - DNA, 50 bp, Artificial Sequence
  Synthetic oligonucleotide
gctgctgtgatcttcctgtcaagctggtgactgagacttcccatcactcg

SEQ ID NO: 2702 - DNA, 50 bp, Artificial Sequence
  Synthetic oligonucleotide
tctagacaccagtgggccgagtggagcagatgccagttgggaccttcccg

SEQ ID NO: 2703 - DNA, 50 bp, Artificial Sequence
  Synthetic oligonucleotide
cgcctgcagccggcgacttttccccaggaatctctggcctggcgcccttt

SEQ ID NO: 2704 - DNA, 50 bp, Artificial Sequence
  Synthetic oligonucleotide
cgggaaggcactccctgaccgcagatcacactctgcagctgatccacacc

SEQ ID NO: 2705 - DNA, 50 bp, Artificial Sequence
  Synthetic oligonucleotide
gggccttgtctccctaacgagtgccaggtgaggctgcggcggctccgacg

SEQ ID NO: 2706 - DNA, 50 bp, Artificial Sequence
  Synthetic oligonucleotide
cgcagagggaggagaagagaaggggcagaaactaaacagccatagtaggc

SEQ ID NO: 2707 - DNA, 50 bp, Artificial Sequence
  Synthetic oligonucleotide
ctgggggagatccgcaagttagcttatgcggtagggggtgtcgcactgcg

SEQ ID NO: 2708 - DNA, 50 bp, Artificial Sequence
  Synthetic oligonucleotide
tggtaacgtgcagtagacgcactgtattccatgggctcccttgtaagccg

SEQ ID NO: 2709 - DNA, 50 bp, Artificial Sequence
  Synthetic oligonucleotide
cctggttaggctaaggtaggagcggcctgaagacgcgcgtttagaaggcg

SEQ ID NO: 2710 - DNA, 50 bp, Artificial Sequence
  Synthetic oligonucleotide
ggcagttagagacgaggcgtttcaggtgaactgtatgtagtgttactccg

SEQ ID NO: 2711 - DNA, 50 bp, Artificial Sequence
  Synthetic oligonucleotide
cgcctgaaaaccaaactgtctggcgcttaacggttacctcggctgagcga

SEQ ID NO: 2712 - DNA, 50 bp, Artificial Sequence
  Synthetic oligonucleotide
cagaaactggaatgtgtgcctagcatgcccctaacctgtatatgcacacg

SEQ ID NO: 2713 - DNA, 50 bp, Artificial Sequence
  Synthetic oligonucleotide
ctttgcctctgtggacccactgtggaggcaagcaggacatgagataatcg

SEQ ID NO: 2714 - DNA, 50 bp, Artificial Sequence
  Synthetic oligonucleotide
cggacacagagacttggtcataaggcaaacattaacccccagcgaacacg

SEQ ID NO: 2715 - DNA, 50 bp, Artificial Sequence
  Synthetic oligonucleotide
agacggcctttccctagggttcataaagaccctttcaagccaccctcccg

SEQ ID NO: 2716 - DNA, 50 bp, Artificial Sequence
  Synthetic oligonucleotide
acattttactccaaattaccattttaagaaccctatgaatctgcgaggcg

SEQ ID NO: 2717 - DNA, 50 bp, Artificial Sequence
  Synthetic oligonucleotide
gccgcagcagcagcggcagtcacaggcacatcagcaaagaggtacagtcg

SEQ ID NO: 2718 - DNA, 50 bp, Artificial Sequence
  Synthetic oligonucleotide
cgctatgggtagggaagcggggctgccttgactctcagtgcgggtccccg

SEQ ID NO: 2719 - DNA, 50 bp, Artificial Sequence
  Synthetic oligonucleotide
atatcgggcgtcttgcttcaatttcctcccgaggtcttgagggatgaccg

SEQ ID NO: 2720 - DNA, 50 bp, Artificial Sequence
  Synthetic oligonucleotide
cggagggcctggtcgcctggaggaagccggaggcctgcgtggaggaggcg

SEQ ID NO: 2721 - DNA, 50 bp, Artificial Sequence
  Synthetic oligonucleotide
cgaagacctagagaaagatgacagcacgaagagagacagggagaatccga

SEQ ID NO: 2722 - DNA, 50 bp, Artificial Sequence
  Synthetic oligonucleotide
cccttgggcgctctggggcctacggaggccttaaaccccaaagattggcg

SEQ ID NO: 2723 - DNA, 50 bp, Artificial Sequence
  Synthetic oligonucleotide
agccaaggtccagatctgccaaggtagggagctgaaaggcccctgcctcg

SEQ ID NO: 2724 - DNA, 50 bp, Artificial Sequence
  Synthetic oligonucleotide
ttgagtcaaaggcaggatcaggttccccgccttccagtccaaaaatcccg

SEQ ID NO: 2725 - DNA, 50 bp, Artificial Sequence
  Synthetic oligonucleotide
ggagaatgttcaggactgtcgaggcgcgctccgcacctggcctgaaagcg

SEQ ID NO: 2726 - DNA, 50 bp, Artificial Sequence
  Synthetic oligonucleotide
cgcgcacccgtggcagcaccacagagggaataaaagcagggtaaacaatt

SEQ ID NO: 2727 - DNA, 50 bp, Artificial Sequence
  Synthetic oligonucleotide
cggcggctctgcggggtcccaagcctccctggcctggaggcattctagaa

SEQ ID NO: 2728 - DNA, 50 bp, Artificial Sequence
  Synthetic oligonucleotide
cggacactggcctcttcgatctcagcaccgcagtcagaggtggtggggca

SEQ ID NO: 2729 - DNA, 50 bp, Artificial Sequence
  Synthetic oligonucleotide
gcgcgagagtggggtgggtgacgcgcgccagccacggagaatgaggctcg

SEQ ID NO: 2730 - DNA, 50 bp, Artificial Sequence
  Synthetic oligonucleotide
gagttgattgctattgggatccgctgagtaaagacacgggcaggggtgcg

SEQ ID NO: 2731 - DNA, 50 bp, Artificial Sequence
  Synthetic oligonucleotide
atgcaggacccatgcctgcttcagtcatcgcagagctgtggggctatgcg

SEQ ID NO: 2732 - DNA, 50 bp, Artificial Sequence
  Synthetic oligonucleotide
cttctgcttggggtccaccagacgctgcacatttgccactcatctgaacg

SEQ ID NO: 2733 - DNA, 50 bp, Artificial Sequence
  Synthetic oligonucleotide
cggttccttgcagtcctccgtgtcgtcccgcacatcctcatagacaacgc

SEQ ID NO: 2734 - DNA, 50 bp, Artificial Sequence
  Synthetic oligonucleotide
ccgcgaactcctggcaggtgagcgaagctgcggccttggtgggggcagcg

SEQ ID NO: 2735 - DNA, 50 bp, Artificial Sequence
  Synthetic oligonucleotide
tgctgcagggtcgcggtggggtttgcgtctgaaacgccggcggtggctcg

SEQ ID NO: 2736 - DNA, 50 bp, Artificial Sequence
  Synthetic oligonucleotide
cggccagacctctcgacagatctcattttgtcgcgccgtctggccgccag

SEQ ID NO: 2737 - DNA, 50 bp, Artificial Sequence
  Synthetic oligonucleotide
cgctctggggcaggatggaggttgtgtcctggtcagccaacggttctgtc

SEQ ID NO: 2738 - DNA, 50 bp, Artificial Sequence
  Synthetic oligonucleotide
cggcagaacaagaagtggctgtgtcactggatacctgtacatttgaatac

SEQ ID NO: 2739 - DNA, 50 bp, Artificial Sequence
  Synthetic oligonucleotide
tccccctttttcgccacgcggaaactggccggtctggacaagggattgcg

SEQ ID NO: 2740 - DNA, 50 bp, Artificial Sequence
  Synthetic oligonucleotide
ctaaatgtgcccaacagcaaggaaaatcgaattgagtgcgggctcattcg

SEQ ID NO: 2741 - DNA, 50 bp, Artificial Sequence
  Synthetic oligonucleotide
cggctctgaccacacactcccgcgcgtcgacgccatggcccacacctcaa

SEQ ID NO: 2742 - DNA, 50 bp, Artificial Sequence
  Synthetic oligonucleotide
cgcccgccctgcgtctccgcaccaagccctgtagctccgagaggcatgaa

SEQ ID NO: 2743 - DNA, 50 bp, Artificial Sequence
  Synthetic oligonucleotide
cggctcggaagccgaagaatcgaaacatggctcaagaagctacttgtcac

SEQ ID NO: 2744 - DNA, 50 bp, Artificial Sequence
  Synthetic oligonucleotide
acactggaatgttggcccagtgtatgactcaggctagttcccagcagtcg

SEQ ID NO: 2745 - DNA, 50 bp, Artificial Sequence
  Synthetic oligonucleotide
cggaagcaggttcaggatgacagagccaaccccatgattacagactgaat

SEQ ID NO: 2746 - DNA, 50 bp, Artificial Sequence
  Synthetic oligonucleotide
aggggcccgagcgaagccggtgtccccagcagggcagcctgcgagaagcg

SEQ ID NO: 2747 - DNA, 50 bp, Artificial Sequence
  Synthetic oligonucleotide
cgccctggcctcagtgcccgagtgcagttgtctaacgatggcccgtggtc

SEQ ID NO: 2748 - DNA, 50 bp, Artificial Sequence
  Synthetic oligonucleotide
cactttgagagggatcccctatggtatccagtcaaaggggccggcactcg

SEQ ID NO: 2749 - DNA, 50 bp, Artificial Sequence
  Synthetic oligonucleotide
cgcacggcggcgacacacgggagaagcgagcatgttcccaacatatatac

SEQ ID NO: 2750 - DNA, 50 bp, Artificial Sequence
  Synthetic oligonucleotide
tctcggagcctggaagacattatgaccactaagcgggtgtccataattcg

SEQ ID NO: 2751 - DNA, 50 bp, Artificial Sequence
  Synthetic oligonucleotide
cgccttcgttgggtggaacgaagaggagtgtgtgtttgtcttaaaaatta

SEQ ID NO: 2752 - DNA, 50 bp, Artificial Sequence
  Synthetic oligonucleotide
agcaacagtgattcttagagaagtaacattaacacatcacagagcatccg

SEQ ID NO: 2753 - DNA, 50 bp, Artificial Sequence
  Synthetic oligonucleotide
cgcccctggacaccgcccagaaaggactcacagccaagtggcaggccagg

SEQ ID NO: 2754 - DNA, 50 bp, Artificial Sequence
  Synthetic oligonucleotide
ggccaggggcgaggcgctcattggccaatagggctgagtgacacgagtcg

SEQ ID NO: 2755 - DNA, 50 bp, Artificial Sequence
  Synthetic oligonucleotide
cggggcaggcgctcacagactgtgtccactgaacttcatcttgtttttgt

SEQ ID NO: 2756 - DNA, 50 bp, Artificial Sequence
  Synthetic oligonucleotide
cgcccccacgggactcagaaccctgaggctcttctagagacaccaacttg

SEQ ID NO: 2757 - DNA, 50 bp, Artificial Sequence
  Synthetic oligonucleotide
gtggtcaccatccctctgtgagcctctgtgcaccttggtagcctttttcg

SEQ ID NO: 2758 - DNA, 50 bp, Artificial Sequence
  Synthetic oligonucleotide
tcttgagggtatcttttcgtggtgcaccatgggtatgcaaatcacaggcg

SEQ ID NO: 2759 - DNA, 50 bp, Artificial Sequence
  Synthetic oligonucleotide
actcgctcagcaacttagcagggggctcctagactccccgagggtgagcg

SEQ ID NO: 2760 - DNA, 50 bp, Artificial Sequence
  Synthetic oligonucleotide
cggggcctgcacggaaggacaggggcgcctcccagacccacccttcccgc

SEQ ID NO: 2761 - DNA, 50 bp, Artificial Sequence
  Synthetic oligonucleotide
atcacaaaagaattaatgttttcacagccctttgaagacgtggtgtcacg

SEQ ID NO: 2762 - DNA, 50 bp, Artificial Sequence
  Synthetic oligonucleotide
cggcgcgaggggtttcatttgtctcagtgttgcaagtttacaggtgctga

SEQ ID NO: 2763 - DNA, 50 bp, Artificial Sequence
  Synthetic oligonucleotide
gcaagagtttgcaaaaacattgggcgtctcatttggcgagcgttttggcg

SEQ ID NO: 2764 - DNA, 50 bp, Artificial Sequence
  Synthetic oligonucleotide
agaatgccctgccggagatataggatagcagtatcccgtggggtacgccg

SEQ ID NO: 2765 - DNA, 50 bp, Artificial Sequence
  Synthetic oligonucleotide
cgcagcagatggtggcggagctgcaagggaaacgacctccccaatttttt

SEQ ID NO: 2766 - DNA, 50 bp, Artificial Sequence
  Synthetic oligonucleotide
cgaaagccaagtggaggttctcttgggaagcccggggactgtggcagccg

SEQ ID NO: 2767 - DNA, 50 bp, Artificial Sequence
  Synthetic oligonucleotide
cgagggatttgcacaaggcttcatagtaaggagccatgtctaacatgcaa

SEQ ID NO: 2768 - DNA, 50 bp, Artificial Sequence
  Synthetic oligonucleotide
cggcatgtccggatgctcgtttcccagtaagattgtattagaaggcagtt

SEQ ID NO: 2769 - DNA, 50 bp, Artificial Sequence
  Synthetic oligonucleotide
gtgtggcaggggaatttctagccccttccaatgtgtccctcccagggacg

SEQ ID NO: 2770 - DNA, 50 bp, Artificial Sequence
  Synthetic oligonucleotide
gaggtcgtcgtcgtcgcccagcagcaagggctgcaaaatagtagaactcg

SEQ ID NO: 2771 - DNA, 50 bp, Artificial Sequence
  Synthetic oligonucleotide
ctcaggcagggcgtgggtttccctcagattcaatgatcctgctgggctcg

SEQ ID NO: 2772 - DNA, 50 bp, Artificial Sequence
  Synthetic oligonucleotide
aattcgctcctgcagtccctaaacttgactgtaaccacctctggttttcg

SEQ ID NO: 2773 - DNA, 50 bp, Artificial Sequence
  Synthetic oligonucleotide
cgccccttggaagctcagcaccaaaggcaggcggccagggtcctggcccc

SEQ ID NO: 2774 - DNA, 50 bp, Artificial Sequence
  Synthetic oligonucleotide
cgggcggggccaccccaagcgccaccaaattccttgtaagggctgcggag

SEQ ID NO: 2775 - DNA, 50 bp, Artificial Sequence
  Synthetic oligonucleotide
cgggagcaccccgccaggggaccgggaagggtcgaggaaaactgctgccg

SEQ ID NO: 2776 - DNA, 50 bp, Artificial Sequence
  Synthetic oligonucleotide
taagccgtcaaagggggcgtggggcttttttgttaaccctcggcggtccg

SEQ ID NO: 2777 - DNA, 50 bp, Artificial Sequence
  Synthetic oligonucleotide
ggcagtttttgtgtctaatcactgccatagatggagcttctgggctctcg

SEQ ID NO: 2778 - DNA, 50 bp, Artificial Sequence
  Synthetic oligonucleotide
cggaaaatcaggagtcatatgaggaaggctgggaaatgaattctcttgta

SEQ ID NO: 2779 - DNA, 50 bp, Artificial Sequence
  Synthetic oligonucleotide
cagatgcacgctgggcggtgcacagggcagggcgggcaggcggtacaccg

SEQ ID NO: 2780 - DNA, 50 bp, Artificial Sequence
  Synthetic oligonucleotide
cggcacttagctttcgcgatcgctatttctagaattaagggacgaggccc

SEQ ID NO: 2781 - DNA, 50 bp, Artificial Sequence
  Synthetic oligonucleotide
cgcctaattttccgcacggatgagtagacccaggcccagttcggatccgt

SEQ ID NO: 2782 - DNA, 50 bp, Artificial Sequence
  Synthetic oligonucleotide
cgcggtgctttagtggctaaaagtgaaagagctgccttggcagaattcag

SEQ ID NO: 2783 - DNA, 50 bp, Artificial Sequence
  Synthetic oligonucleotide
cgggcaggctgtgaagcatccaacacaaaccgaagccgcccgcctggcgt

SEQ ID NO: 2784 - DNA, 50 bp, Artificial Sequence
  Synthetic oligonucleotide
ttgggcgggcggggacgccagctcttctaaatccaggtgaggagctgccg

SEQ ID NO: 2785 - DNA, 50 bp, Artificial Sequence
  Synthetic oligonucleotide
cgctgagagtcctcacaactgcgtctccggaggcagaacgaagtggggac

SEQ ID NO: 2786 - DNA, 50 bp, Artificial Sequence
  Synthetic oligonucleotide
cggcagattgtgtagtggtgaacctatggttttctgaagatatctcttac

SEQ ID NO: 2787 - DNA, 50 bp, Artificial Sequence
  Synthetic oligonucleotide
cggaaaaaattacaatggataaggacacagtaggctttttgagtatccag

SEQ ID NO: 2788 - DNA, 50 bp, Artificial Sequence
  Synthetic oligonucleotide
cgagagcaatgcgtatacagccagcagctctaagccctccaaagtcctaa

SEQ ID NO: 2789 - DNA, 50 bp, Artificial Sequence
  Synthetic oligonucleotide
gagcttagtgtggggctgcccgggctggtccccagctcaccgcagctgcg

SEQ ID NO: 2790 - DNA, 50 bp, Artificial Sequence
  Synthetic oligonucleotide
cgaagggcctgaggggtccaactgcgcatgtgtattcctcggttttcccg

SEQ ID NO: 2791 - DNA, 50 bp, Artificial Sequence
  Synthetic oligonucleotide
tagtttcagaagaatgtccagggcctttccaccaccctgggggcagcacg

SEQ ID NO: 2792 - DNA, 50 bp, Artificial Sequence
  Synthetic oligonucleotide
tctgagtaaggaaacagcctccaagcatcagcagagcccagatgagcacg

SEQ ID NO: 2793 - DNA, 50 bp, Artificial Sequence
  Synthetic oligonucleotide
gttgggaaggacttaacttttcaccgcagggcctgagtcctggctttccg

SEQ ID NO: 2794 - DNA, 50 bp, Artificial Sequence
  Synthetic oligonucleotide
gaggggctcaggctgcgggagcgccgctgcaggagcctgggcgggctgcg

SEQ ID NO: 2795 - DNA, 50 bp, Artificial Sequence
  Synthetic oligonucleotide
cggggcacaatgatctgtccttgaggacaaagagtgattccggagagagc

SEQ ID NO: 2796 - DNA, 50 bp, Artificial Sequence
  Synthetic oligonucleotide
cgggcctggcccaattactttcttcagtctgagcatgagggctggaagaa

SEQ ID NO: 2797 - DNA, 50 bp, Artificial Sequence
  Synthetic oligonucleotide
cgctacccttgtgcttgcgttgcccacaagcttgtagtcagaagaactcg

1. A method of identifying subjects having prostate cancer comprising:
obtaining a sample from a subject;
isolating DNA from the sample;
determining the methylation status of the DNA; and
comparing the methylation status of the DNA to one or more methylated probes selected from the group consisting of cg00697992, cg01272707, cg01819167, cg01906055, cg02160684, cg02560085, cg03195164, cg03456213, cg04634417, cg06024295, cg11748187, cg13300630, cg13944838, cg14399930, cg15132013, cg16469740, cg17004353, cg17032646, cg18315943, cg19550524, cg20399616, cg24517686, cg25961816, cg26447413 and cg27198013,
wherein the methylated probe comprises a sequence region that extends up to 250 base pairs upstream and downstream from the methylated probe, and
wherein the comparison indicates whether the sample is normal, a non-aggressive prostate cancer, or an aggressive prostate cancer.

2. The method of claim 1, wherein the sample is a biopsy sample.

3. The method of claim 2, wherein the biopsy is from a prostate.

4. The method of claim 2, wherein the biopsy is from a pelvic lymph node.

5. The method of claim 1, wherein two or more methylated probes are selected.

6. The method of claim 1, wherein the sample is selected from the group consisting of blood, plasma and urine.

7. The method of claim 1, wherein the sequence region extends up to 100 base pairs upstream and downstream from the methylated probe.

8. The method of claim 1, wherein the sequence region extends 0 base pairs upstream and downstream from the methylated probe.

9. The method of claim 1, wherein five or more methylated probes are selected.

10. The method of claim 1, wherein fifteen or more methylated probes are selected.

11. A method of classifying prostate cancer comprising:
obtaining a sample from a subject;
isolating DNA from the sample;
determining the methylation status of the DNA; and
comparing the methylation status of the DNA to one or more methylated probes selected from the group consisting of cg00697992, cg01272707, cg01819167, cg01906055, cg02160684, cg02560085, cg03195164, cg03456213, cg04634417, cg06024295, cg11748187, cg13300630, cg13944838, cg14399930, cg15132013, cg16469740, cg17004353, cg17032646, cg18315943, cg19550524, cg20399616, cg24517686, cg25961816, cg26447413 and cg27198013,
wherein the methylated probe comprises a sequence region that extends up to 250 base pairs upstream and downstream from the methylated probe, and
wherein the comparison indicates whether the prostate cancer is non-aggressive or aggressive.

12. The method of claim 11, wherein the sample is a biopsy sample.

13. The method of claim 12, wherein the biopsy is from a prostate.

14. The method of claim 12, wherein the biopsy is from a pelvic lymph node.

15. The method of claim 11, wherein two or more methylated probes are selected.

16. The method of claim 11, wherein the sample is selected from the group consisting of blood, plasma and urine.

17. The method of claim 11, wherein the sequence region extends up to 100 base pairs upstream and downstream from the methylated probe.

18. The method of claim 11, wherein the sequence region extends 0 base pairs upstream and downstream from the methylated probe.

19-20. (canceled)

21. A method of identifying subjects having prostate cancer comprising:
obtaining a sample from a subject;
isolating DNA from the sample;
determining the methylation status of the DNA; and
comparing the methylation status of the DNA to one or more methylated probes selected from the group consisting of cg20399616, cg12737160, cg23624008, cg09789590, cg23095615, cg14273822, cg04294888, cg12098872, cg21981270, cg21526205, cg09806262, cg01940855, cg23855505, cg18423852, cg22260952, cg21883802, cg00036011, cg26573704, cg12727795 and cg01404317,
wherein the methylated probe comprises a sequence region that extends up to 250 base pairs upstream and downstream from the methylated probe, and
wherein the comparison indicates whether the sample is normal or prostate cancer.

22-40. (canceled)
